(19) United States
(12) Patent Application Publication
(10) Pub. No.: US 2006/0223075 A1
(43) Pub. Date: Oct. 5, 2006

(54) Unique sequence hybridization probes (USP)

(75) Inventors: Lisa Davis, Albuquerque, NM (US); Lei Tang, Albuquerque, NM (US)

Correspondence Address: MCDONNELL BOEHNEN HULBERT & BERGHOFF LLP, 300 S. WACKER DRIVE, 32ND FLOOR, CHICAGO, IL, 60606, US

(73) Assignee: Exagen Diagnostics, Inc.

(21) Appl. No.: 11/112,926

(22) Filed: Apr. 22, 2005

Related U.S. Application Data
(60) Provisional application No. 60/666,000, filed on Mar. 29, 2005.

(51) Int. Cl. C12Q 1/68; C12P 19/34

(52) U.S. Cl. 435/6; 435/91.2

(57) ABSTRACT

The present invention provides unique sequence probes, methods for generating them, and methods for using unique sequence probes in hybridization assays.

### CROSS REFERENCE

[0001] This application claims priority to U.S. Provisional patent application Ser. No. 10/666,000 filed Mar. 29, 2005.

### INCORPORATION BY REFERENCE

[0002] A compact disc submission containing a Sequence Listing is hereby expressly incorporated by reference. The submission includes two compact discs (“COPY 1” and “COPY 2”), which are identical in content. Each disc contains the file entitled “05-218-US SeqListing.ST25.txt,” 645 KB in size, created Apr. 22, 2005.

### FIELD OF THE INVENTION

[0003] This invention relates generally to the fields of nucleic acids, detection, hybridization, diagnostics, and prognostics.

### BACKGROUND

[0004] Nucleic acid detection generally involves hybridization via base-pair binding of nucleic acid probes to a nucleic acid target. Such detection assays find wide utility in the areas of basic and clinical research, as well as in a variety of diagnostic and prognostic applications. Nucleic acid detection can be carried out to detect a target nucleic acid in complex samples, such as genomic DNA, total RNA, chromosome spreads, cells, and tissue samples. Similarly, probes for the target of interest often contain both a unique sequence component, specific for the target, and one or more repetitive sequence DNA elements that are not specific for the target. If the repetitive sequences are not disabled, the probe reacts with multiple repeat-containing nucleic acids in the sample, and thus will not specifically react with the target nucleic acid. This problem is particularly acute with interspersed repeat sequences which are widely scattered throughout the genome, but also is present with tandem repeats clustered or contiguous on the DNA molecule.

[0005] Non-specific hybridization of repetitive sequences can be disabled in several ways. The most common method for disabling repetitive sequences is to block the repetitive sequence/sequences by pre-association with excess unlabeled repetitive sequence containing complimentary fragments such as COT-1 DNA, generically known as competitor nucleic acid or blocking nucleic acid. In its typical usage, the repetitive sequences in the probe are annealed to the complimentary unlabeled repetitive sequences in the competitor nucleic acid prior to target hybridization, a process routinely referred to as “pre-annealing.” During the pre-annealing step, the labeled repetitive sequences of the probe and the unlabeled repetitive sequences of the competitor nucleic acid rapidly hybridize over the entire length of shared complementarity. Since only single stranded nucleic acid probe is able to hybridize to the target nucleic acid, the repetitive sequence in the probe is no longer available to hybridize to the target, leaving only the unique sequence component of the probe available for hybridization. Commercial application of this method requires preparation, or purchase from a commercial source, of large quantities of competitor nucleic acid which can be prohibitively time consuming and expensive.

[0006] Other techniques for disabling the repetitive sequence components of nucleic acid probes include those that call for additional manipulation steps of the probe itself prior to hybridization (see Craig et al., Hum Genet 1997 September; 100(3-4):472-6; and Hozier et al., Cytogenet. Cell Genet 1998; 83(1-2):60-3), which limit their applicability to commercial preparation of probe sets.

[0007] Attempts to use polymerase chain reaction (“PCR”) to generate unique sequence probes from repetitive DNA-containing probes have met with some success; however, these methods required purification of appropriate sized PCR product by gel electrophoresis to remove single-stranded PCR extension products with flanking repetitive sequences. (Rogan et al., Genome Research 11:1086-1094(2001); U.S. Pat. No. 6,828,097) As a result, the method is not applicable to commercial scale production, or to the preparation, for example, of larger numbers of unique sequence probes for a large chromosomal region target nucleic acid.

[0008] Thus, improved methods for preparation of unique sequence probes are desirable, particularly for use in commercial production of such unique sequence probes.

### SUMMARY OF THE INVENTION

[0009] The present invention provides unique sequence probes, and methods for their preparation and use. In one aspect, the invention provides methods for preparing unique sequence probes comprising:

[0010] (a) identifying unique sequence elements contained in a nucleic acid probe, wherein the nucleic acid probe comprises a plurality of unique sequence elements and a plurality of repetitive sequence elements, and wherein the unique sequence elements in the nucleic acid probe selectively bind to a nucleic acid target of interest;

[0011] (b) amplifying unique sequence elements in the nucleic acid probe to generate amplified unique sequence elements, wherein the amplifying comprises
[0012] (i) contacting the nucleic acid probe with primer sets for a plurality of unique sequence elements under conditions to promote hybridization of the primer sets to the nucleic acid probe, wherein each primer in the plurality of primer sets has an annealing temperature of between 52° C. and 65° C., and wherein the annealing temperature for all of the primers in the plurality of primer sets are within 3° C. of each other; and
[0013] (ii) amplifying unique sequence elements defined by the primer sets in by polymerase chain reaction under conditions that comprise annealing the plurality of primer sets to the nucleic acid probe at a temperature between 51° C. and 65° C.; and

[0014] (c) pooling the amplified unique sequence elements to produce the unique sequence probe.

[0015] The present invention also provide unique sequence probes made by the methods of the invention, polynucleotide primer sets for generating such unique sequence probes, and kits containing such compositions.

[0016] In a further aspect, the present invention provides methods for detecting a nucleic acid target of interest, comprising:

[0017] (a) generating a unique sequence probe according to the methods of the invention for the nucleic acid target of interest;

[0018] (b) contacting the unique sequence probe to a specimen to be tested under conditions to promote hybridization of the unique sequence probe to the nucleic acid target; and

[0019] (c) detecting hybridization complexes formed between the unique sequence probe and the nucleic acid target, wherein such hybridization complexes provide a measure of the nucleic acid target in the specimen.

### BRIEF DESCRIPTION OF THE FIGURES

[0020] FIG. 1. Schematic representation of a genome region showing the relationship between a) transcribed sequences, b) repetitive sequences, and c) unique sequences. Note that repetitive sequences are randomly dispersed, of varying lengths, and can occur between transcribes segments of a single gene and within transcribe sequences (indicated by the double arrow).

[0021] FIG. 2 is a diagram of a representative method for producing unique sequence probes according to the present invention. A) Each unique sequence segment of the genome regions is amplified with a unique pair of primers. (b) The PCR products are pooled, c) labeled with a fluorochrome, and (d) hybridized to complex targets including metaphase chromosome spreads, interphase cells, or DNA microarray chromosomes.

[0022] FIG. 3 is a table listing the primers used to make the SMARCE1 USP.

[0023] FIG. 4 is a table listing the primers used to make the PDCD6IP USP.

[0024] FIG. 5 is a table listing the primers used to make the CYP24 USP.

[0025] FIG. 6 is a table listing the primers used to make the NR1D1 USP.

[0026] FIG. 7 is a table listing the primers used to make the BIRC5 USP.

### DETAILED DESCRIPTION OF THE INVENTION

[0027] All references cited are herein incorporated by reference in their entirety.

[0028] Within this application, unless otherwise stated, the techniques utilized may be found in any of several well-known references such as: Molecular Cloning: A Laboratory Manual (Sambrook, et al., 1989, Cold Spring Harbor Laboratory Press), Gene Expression Technology (Methods in Enzymology, Vol. 185, edited by D. Goeddel, 1991. Academic Press, San Diego, Calif.), “Guide to Protein Purification” in Methods in Enzymology (M. P. Deutshcer, ed., (1990) Academic Press, Inc.); PCR Protocols: A Guide to Methods and Applications (Innis, et al. 1990. Academic Press, San Diego, Calif.), Culture of Animal Cells: A Manual of Basic Technique, 2^{nd} Ed. (R. I. Freshney. 1987. Liss, Inc. New York, N.Y.), Gene Transfer and Expression Protocols, pp. 109-128, ed. E. J. Murray, The Humana Press Inc., Clifton, N.J.), and the Ambion 1998 Catalog (Ambion, Austin, Tex.); Fish: A Practical Approach, Barbara G. Beatty, Sabine Mai, and Jeremy A. Squire, editors (Oxford University Press, 2002).

[0029] The present invention provides unique sequence probes, and methods for their preparation. These probes and methods circumvent the need for competitor DNA and for laborious post-amplification purification, and thus are especially useful for commercial preparation of unique sequence probes, although they can be used for any preparation of unique sequence probes.

[0030] In a first aspect, the invention provides methods for preparing unique sequence probes comprising:

[0031] (a) identifying unique sequence elements contained in a nucleic acid probe, wherein the nucleic acid probe comprises a plurality of unique sequence elements and a plurality of repetitive sequence elements, and wherein the unique sequence elements in the nucleic acid probe selectively bind to a nucleic acid target of interest;

[0032] (b) amplifying unique sequence elements in the nucleic acid probe to generate amplified unique sequence elements, wherein the amplifying comprises
[0033] (i) contacting the nucleic acid probe with primer sets for a plurality of unique sequence elements under conditions to promote hybridization of the primer sets to the nucleic acid probe, wherein each primer in the plurality of primer sets has an annealing temperature of between 52° C. and 65° C., and wherein the annealing temperature for all of the primers in the plurality of primer sets are within 3° C. of each other; and
[0034] (ii) amplifying unique sequence elements defined by the primer sets by polymerase chain reaction under conditions that comprise annealing the plurality of primer sets to the nucleic acid probe at a temperature between 51° C. and 65° C.; and

[0035] (c) pooling the amplified unique sequence elements to produce the unique sequence probe.

[0036] As used herein, a “nucleic acid probe” (or “probe”) is any nucleic acid probe for a target of interest, wherein the nucleic acid probe contains a plurality of both unique sequence elements and repetitive sequence elements. Thus, the nucleic acid probe comprises both “unique” DNA sequences which are complementary to and specific for at least a portion of a target nucleic acid of interest and “repetitive” DNA sequences, which appear repeatedly in the genome of which the target nucleic acid is a part. Such nucleic acid probes can be derived from many different sources, including but not limited to chromosomal DNA, genomic DNA libraries, (including bacterial artificial chromosome (BAC) DNA libraries, yeast artificial chromosome (YAC) DNA libraries, P1 DNA libraries, lambda clone libraries, cosmid clone libraries, fosmid libraries, plasmid DNA libraries), and cDNA copies of expressed genes, cDNA clones isolated from cDNA or expression libraries, and polymerase chain reaction products prepared directly from genomic DNA. While the length of the nucleic acid probe is not critical to the invention, it is preferred that it is at least 2 kilobases (“kb”) in length; in various preferred embodiments, the nucleic acid probe is at least 5, 10, 15, 20, 25, 30, 35, 40, 45, 50, 55, 60, 65, 70, 75, 80, 85, 90, 95, 100, 105, 110, 115, 120, 125, 130, 135, 140, 145, 150, 155, 160, 165, 170, 175, 180, 185, 190, 195, 200, 205, 210, 215, 220, 225, 230, 235, 240, 245, 250, 300, 350, 400, 450, 500, 550, 600, 650, 700, 750, 800, 850, 900, 950, 1000, 1500, 2000, 2500, 3000, 3500, 4000, 4500, or 5000 kb in length.

[0037] Prior to use in the methods of the invention, the nucleic acid probe is preferably double stranded. The nucleic acid probe can be free in solution or can be contained within a vector of some sort, including plasmids, viruses, and bacterial artificial chromosomes.

[0038] As used herein, the “nucleic acid target of interest” can be any nucleic acid target detectable by using the unique sequence probes according to the methods of the invention. In a preferred embodiment, the nucleic acid target of interest comprises a single copy gene, or a non-coding unique sequence segment of a gene, such as an intron, or the non-translated 3′ or 5′ region of a gene, or a unique intergenic segment in a genome. As used herein, a “single copy gene” is one that can be distinguished using standard DNA hybridization methods (ie: hybridization conditions and probe selection, such that only the desired target is detected under standard hybridization and wash conditions) from other genes in the genome in which the target nucleic acid is present. The nucleic acid target of interest can also comprise a member of a gene family, wherein at least some of the USPs share a region of homology with one or more members of the gene family, such that some or all members of the family are detected as unique entities, but still without cross-hybridization to unrelated regions of the genome due to the repetitive elements of the original probe.

[0039] As used herein, “unique sequence elements” are those portions of the nucleic acid probe that do not include a repetitive sequence element, but are bounded in the nucleic acid probe by repetitive sequence elements. In a preferred embodiment, the “unique sequence elements” can be used to selectively hybridize under standard hybridization conditions to a single copy gene, or any unique sequence region, in the genome of which the target nucleic acid is a part.

[0040] As used herein, “repetitive sequence elements” are those nucleic acid sequence portions of the nucleic acid probe that hybridize under standard hybridization conditions to repetitive sequences in the genome of which the target nucleic acid is a part, and include highly repetitive sequences, moderately repetitive sequences, tandem repeats (including but not limited to satellites, mini-satellites and micro-satellites), interspersed repeats (including, but not limited to ALUs, LINES and SINES), and palindromic repeats. Such repetitive sequence elements can be located near centromeres and telomeres, within heterogeneously staining regions (HSRS), distributed over a single chromosome, or throughout some or all chromosomes in the genome from which the target nucleic acid is derived. The presence of such repetitive sequence elements in a hybridization probe renders the probe non-specific if used as a whole in, for example, in situ hybridization assays on cells, tissue sections, or chromosome spreads.

[0041] The nucleic acid probes contain a plurality of unique sequence elements and repetitive elements; this requires at least 2 unique sequence elements bounded by repetitive sequence elements; in preferred embodiments, the nucleic acid probe contains at least 5, 10, 15, 20, 25, 30, 35, 40, 45, 50, 55, 60, 65, 70, 75, 80, 85, 90, 95, 100, 200, 300, 400, 500, 600, 700, 800, 900, or 1000 unique sequence elements bounded by an approximately equal number of repetitive sequence elements.

[0042] As used herein, the term “plurality” means two or more.

[0043] As used herein, the phrase “identifying unique sequence elements” means determining the location of a plurality of unique sequence elements within the nucleic acid probe. This does not require the identification of all of the unique sequence elements in a given nucleic acid probe. For example, if a nucleic acid probe of interest contains 50 unique sequence elements, the “identifying” can comprise, for example, identifying 10 of the unique sequence elements. In various preferred embodiments, the identifying comprises identifying at least 10%, 20%, 30%, 40%, 50%, 60%, 70%, 80%, 90%, or 100% of the unique sequence elements in the nucleic acid probe. In various other preferred embodiments, the identifying comprises identifying 5, 10, 15, 20, 25, 30, 35, 40, 45, 50, 55, 60, 65, 70, 75, 80, 85, 90, 95, 100, 200, 300, 400, 500, 600, 700, 800, 900, or 1000 unique sequence elements in the nucleic acid probe. It will be understood by those of skill in the art that such identification can be by any means known in the art, including by DNA sequence analysis and comparison to known repetitive sequence elements, review of DNA sequence information stored in various databases that contain sequence information for a nucleic acid probe of interest (for example, as discussed in the examples below), or by other computational methods. Such known-sequence based techniques provide the sequence from which PCR primers are designed and thus are preferred. It will also be understood that the unique sequence elements can be identified by inference, based on identification of the repetitive sequence elements in the nucleic acid probe. In one such example, repetitive sequences are identified by hybridization with a repetitive sequence probe and all elements that don't hybridize to it are considered as unique sequences. In this case, at least a portion of the unique sequence element DNA is preferably sequenced to define appropriate primers for amplification.

[0044] As used herein, the term “amplifying a plurality of unique sequence elements” means producing additional copies of two or more of the identified unique sequence elements, or portions thereof, in the nucleic acid probe; this amplification generates “amplified unique sequence elements.” It will be understood by those of skill in the art that it not necessary to amplify each of the identified unique sequence elements in the nucleic acid probe. For example, if 50 unique sequence elements are identified in the nucleic acid probe, the “amplifying” can comprise, for example, amplifying 10 of the unique sequence elements. In various preferred embodiments, the amplifying comprises amplifying at least 10%, 20%, 30%, 40%, 50%, 60%, 70%, 80%, 90%, or 100% of the identified unique sequence elements in the nucleic acid probe. In various other preferred embodiments, the amplifying comprises amplifying 5, 10, 15, 20, 25, 30, 35, 40, 45, 50, 55, 60, 65, 70, 75, 80, 85, 90, 95, or 100, 200, 300, 400, 500, 600, 700, 800, 900, or 1000 of the identified unique sequence elements in the nucleic acid probe. It will be further understood by those of skill in the art that it is not necessary to amplify the entire portion of a given identified unique sequence element. Thus, all or a portion of a given identified unique sequence element may be amplified, based on polynucleotide probe design considerations (see below) and other experimental considerations within the knowledge of those of skill in the art.

[0045] As used herein, a “primer set” refers to a group of nucleic acid polynucleotide primers (2 or more primers; preferably 2) that are complementary to a given unique sequence element in the nucleic acid probe and can be used in a polymerase chain reaction (“PCR”) to amplify a defined region of the given unique sequence element. In general, this requires at least two polynucleotide primers, one complementary to the 5′ end of one strand of the nucleic acid probe and the other polynucleotide primer complementary to the 5′ end of the other strand of the nucleic acid probe. There is no particular size constraint on the size of the amplified unique sequence element, other than labeling efficiency (where labeling the USP is desired) and the limitations of PCR. Thus, in a preferred embodiment, the length of the amplified unique sequence element should be at least 200 nucleotides, and up to any desired size. Those skilled in the art know how to optimize PCR conditions to achieve products of the required or desired size.

[0046] As will be understood by those of skill in the art, a plurality of such polynucleotide primer sets can be used to amplify a plurality of different unique sequence elements from the nucleic acid probe. While it is preferred that each primer set is used to amplify a different unique sequence element, multiple primer sets can also be used to amplify different regions of a given unique sequence element, as will be apparent to those of skill in the art.

[0047] Each polynucleotide primer in the plurality of primer sets has an annealing temperature of between 52° C. and 65° C.; preferably between 55° C. and 63° C., and more preferably between 56° C. and 61° C. In any of these embodiments, all of the polynucleotides in the various primer sets for a single nucleic acid probe have an annealing temperature within 0, 1, 2, or 3° C. of each other.

[0048] By way of a non-limiting example, in preparing a USP for a NR1D1 BAC probe (see below) the annealing temperatures for each primer might range from 57-59° C., with an annealing temperature of 56° C. being used during PCR in the NR1D1 USP probe preparation. Similarly, in preparing a USP for a CYP24 BAC probe, the annealing temperatures for each primer might range from 59-61° C., with an annealing temperature of 58° C. being used in PCR in the CYP24 USP probe preparation.

[0049] As will be understood by those of skill in the art, the polynucleotide primer sequence should not be substantially self-complementary or complementary to the other member of the primer pair. Furthermore, the primers should not be substantially complementary to internal sites within the nucleic acid probe (other than the desired site); the primers should not form hairpin loops internally or with the nucleic acid probe or another polynucleotide primer in its primer set.

[0050] Many primer designs software are readily available and freely accessible on the internet (for example http://www.bioinformatics.vg). In one embodiment, primers can be designed and annealing temperatures determined using “FAST PCR” software (http://www.biocenter.helsinki.fi/bi/bare-1_html/oligos.htm.) Fast PCR software is applicable for many PCR applications including standard and long PCR, inverse PCR, and multiplex PCR. Because the program analyzes several sequences simultaneously (up to 1,000,000), primer design for the amplification of more than one product in a single reaction vessel is supported, including design for amplification in the same buffer and at the same annealing temperature. All primers are analyzed for melting temperature using the nearest neighbor thermodynamic theory with unified dS, dH and dG parameters to ensure accurate optimal annealing temperature prediction. The primer design program specifically identifies and eliminates primer sequence that might create pitfalls such as primer-dimer formation, self-complementarity, too low-melting temperature of primers, incorrect internal stability profile, false priming, and primer duplication site control. The program is also designed to accommodate one's personal database by local alignment and other publicly available bioinformatics tools are included. Those of skill in the art will recognize that other such programs are available for primer design.

[0051] Alternatively, polynucleotide primers for use in the present invention can be designed by those of skill in the art without the use of specific software, based on the knowledge of the relevant unique sequence elements, and teachings provided herein.

[0052] Thus, the length of the polynucleotide primer can vary (as disclosed in the examples that follow), so long as the annealing temperature of the primer has an annealing temperature of between 52° C. and 65° C., and so long as all of the primers in the plurality of primer sets have annealing temperatures within 0, 1, 2, or 3° C. of each other. Use of these conditions permits the production of unique sequence probes that circumvent the need for competitor DNA and for laborious post-amplification purification.

[0053] Synthetic polynucleotides can be prepared by a variety of solution or solid phase methods known in the art. For example, detailed descriptions of the procedures for solid phase synthesis of polynucleotide by phosphite-triester, phosphotriester, and H-phosphonate chemistries are widely available. (See, for example, U.S. Pat. No. 6,664,057 and references disclosed therein). Methods to purify polynucleotides include native acrylamide gel electrophoresis, and anion-exchange HPLC, as described in Pearson (1983) J. Chrom. 255:137-149. The sequence of the synthetic polynucleotides can be verified using standard DNA sequencing methods, and are readily available from many commercial sites (such as Integrated DNA Technologies (Coralville, Iowa).

[0054] The term “polynucleotide” as used herein with respect to each aspect and embodiment of the invention refers to DNA or RNA, preferably DNA, in either single- or double-stranded form, preferably single stranded. The term “polynucleotide” encompasses nucleic acids containing known analogues of natural nucleotides which have similar or improved binding properties, for the purposes desired, as the reference polynucleotide. The term also encompasses nucleic-acid-like structures with synthetic backbones. DNA backbone analogues provided by the invention include phosphodiester, phosphorothioate, phosphorodithioate, methylphosphonate, phosphoramidate, alkyl phosphotriester, sulfamate, 3′-thioacetal, methylene(methylimino), 3′-N-carbamate, morpholino carbamate, and peptide nucleic acids (PNAs), methylphosphonate linkages or alternating methylphosphonate and phosphodiester linkages (Strauss-Soukup (1997) Biochemistry 36:8692-8698), and benzylphosphonate linkages, as discussed in U.S. Pat. No. 6,664,057; see also Oligonucleotides and Analogues, a Practical Approach, edited by F. Eckstein, IRL Press at Oxford University Press (1991); Antisense Strategies, Annals of the New York Academy of Sciences, Volume 600, Eds. Baserga and Denhardt (NYAS 1992); Milligan (1993) J. Med. Chem. 36:1923-1937; Antisense Research and Applications (1993, CRC Press).

[0055] In a preferred embodiment, each of the primer sets is used to amplify its relevant unique sequence element from the nucleic acid probe in a separate PCR reaction. In a most preferred embodiment, the nucleic acid probes are amplified in a multiwell format with each primer pair pre-aliquoted to a single well of the multiwell plate. Alternatively, multiple primer sets can be present in individual PCR reactions. For example, a given unique sequence element can be amplified using more than 1 primer set, such as 2 or more primer sets that are used to amplify different portions of the unique sequence element. In a further alternative, 2 or more primer sets can be used to amplify 2 or more different unique sequence elements. In these embodiments, it is preferred that between 2 and 10 different primer pairs are used to amplify 1 or more unique sequence element in a single PCR reaction; more preferable between 2 and 7 different PCR primers, even more preferably between 2 and 5 different PCR primers, and even more preferably between 2 and 3 different PCR primers.

[0056] It is further preferred that the PCR reactions are carried out simultaneously, for example in a microplate adapted for use in PCR. Those of skill in the art are well-versed in such techniques. Exemplary manufacturers of such plates and PCR devices include Applied BioSystems, Perkin Elmer, and MJ Devices.

[0057] PCR conditions to promote amplification of the unique sequence elements can be any of those that are standard in the art, with the proviso that the conditions comprise annealing of the plurality of the primer sets to the nucleic acid probe at a temperature between 51° C. and 65° C. In a preferred embodiment, the annealing step of the PCR reaction is conducted at a temperature approximately 1° C. below that of the annealing temperature of the polynucleotide primers with the lowest annealing temperature in the primer set.

[0058] Determination of an appropriate amount of nucleic acid probe used in a PCR reaction with a single primer set is within the level of those of skill in the art. For example, a BAC clone of approximately 150-200 kb is preferably used at between about 0.01 and 10.0 ng/μl; more preferably between about 0.05 and about 5 ng/μl; even more preferably between about 0.1 and 1.0 ng/μl; and most preferably between about 0.3 and about 0.5 ng/μl.

[0059] Determination of an appropriate amount of a given polynucleotide primer used in a PCR reaction is within the level of those of skill in the art. In a preferred embodiment, the polynucleotide primer concentration ranges from about 0.1 μM to about 20 μM; more preferably between about 0.5 μM and 10 μM; most preferably between about 1 μM and 2.0 μM.

[0060] The PCR reaction mixture will further comprise standard components, including but not limited to DNA polymerase (such as Taq™ DNA Polymerase) present at, for example, 5-50 units/ml), an aqueous buffer medium including a source of cations (for example, MgCl₂, present at between 0.5 and 5 mM), nucleotides (for example, dATP, dGTP, dCTP, and dTTP, each present at between about 100 μM and about 500 μM) and a buffering agent (such as Tris). The pH of the reaction mixture is preferably between 6.5 and 9.0, more preferably between 7.0 and 8.5. It will be understood by those of skill in the art that other components can also be present in the PCR mix, including but not limited to melting point reducing agents (such as formamide).

[0061] The resulting PCR reaction mixture is then put through multiple cycles of denaturation, annealing, and polymerization. The denaturing steps, polymerization steps, and determination of number of reaction cycles to employ can be carried out using any such techniques in the art. Exemplary thermal cyclers for use with the methods of the invention are described in U.S. Pat. Nos. 5,612,473; and 5,602,756.

[0062] In exemplary embodiments, an initial denaturation step is optionally carried out at between about 90° C. and 100° C.; more preferably between about 92° C. and about 98° C.; more preferably between about 94° C. and about 96° C. This initial optional step is carried out for between about 1-10 minutes; more preferably between about 2-8 minutes; and most preferably between about 4-6 minutes.

[0063] Following this optional initial denaturation step, exemplary, non-limiting reaction cycles (20-40 cycles; preferably 25-35 cycles; more preferably 28-32 cycles) are as follows, where the reaction is held at the temperatures specified below for between 5-120 seconds, more preferably between 10-90 seconds; more preferably between 15-60 seconds; and even more preferably between 15-30 seconds:
[0064] 1—Denaturation: the temperature is held at between about 90° C. and 98° C.; more preferably between about 92° C. and about 98° C.; more preferably between about 94° C. and about 96° C.;
[0065] 2—Annealing: the temperature is held at between about 51° C. and 65° C.; more preferably between about 53° C. and about 63° C.; more preferably between about 54° C. and about 61° C.; and more preferably between about 55° C. and about 59° C.
[0066] 3—Extension step: the temperature is held at between about 66° C. and 78° C.; more preferably between about 68° C. and about 76° C.; more preferably between about 70° C. and about 74° C.; more preferably at 72° C.

[0067] As will be understood by those of skill in the art, the time at each step is dependent in part of the thickness of the wall of the PCR tube and the instrument itself.

[0068] After amplification, the amplified unique sequence elements are pooled to produce the unique sequence probe. It will be understood by those of skill in the art that not all of the amplified unique sequence elements are necessarily pooled after the amplification step. In a non-limiting example, in embodiments where the PCR reactions for each primer set are carried out separately, an aliquot from the PCR reaction can be analyzed, for example by gel electrophoresis, to determine whether the expected unique sequence element has been amplified. Those reactions that did not result in amplification of the desired unique sequence element are not used for pooling of the amplified unique sequence elements. However, using the methods of the invention, successful amplification of the unique sequence element without contaminating repetitive sequence elements was found more than 98% of the time, eliminating a requirement for such gel analysis. However, such methods may still be used for verification, as well as to provide an assessment of the amount of amplified unique sequence elements.

[0069] In a further preferred but optional embodiment, those PCR reactions that resulted in amplification of the desired unique sequence element can be subjected to a second round of PCR, using the same primer sets and PCR conditions, to produce larger quantities of the unique sequence element of interest, which are then pooled. Those of skill in the art will be aware that such further amplifications can be carried out more than once, and/or can be scaled up to produce larger amounts of the relevant unique sequence elements prior to pooling. Such further PCR reactions can be optionally evaluated by gel electrophoresis, as described above.

[0070] Approximately equal molar amounts of each secondary PCR product (as judged, for example, by intensity of the PCR products in an ethidium bromide stained agarose gel, or by appropriate spectrophotometric analysis) are then pooled. The pool of PCR products can then be optionally purified from residual un-extended primers using a purification column such as the QIAquick PCR Purification Kit or the MinELute 96 UF PCR Purification Kit (Qiagen, Valencia Calif.) or YM-30 microcon columns (Millipore), although this process is not required, but may provide for more accurate quantification of the PCR products.

[0071] Concentration and purity of the resulting unique sequence probe (“USP”) can then be evaluated, for example, by spectrophotometrically measuring UV absorbance at 260 and 280 nm and calculating the 260/280 ratio.

[0072] The USP can then be labeled with a detectable label. Useful detectable labels include but are not limited to radioactive labels such as ³²P, ³H, and ¹⁴C; fluorescent dyes such as fluorescein isothiocyanate (FITC), rhodamine, lanthanide phosphors, Texas red, and ALEXIS™ (Invitrogen/Molecular Probes), CY™ dyes (Amersham) and Spectrum dyes (Abbott Labs), electron-dense reagents such as gold; enzymes such as horseradish peroxidase, beta-galactosidase, luciferase, and alkaline phosphatase; colorimetric labels such as colloidal gold; magnetic labels such as those sold under the mark DYNABEADS™; biotin; dioxigenin; or haptens and proteins for which antisera or monoclonal antibodies are available. In a most preferred embodiment, the USP is labeled with a fluorescent nucleoside analog, such as dUTP, in a direct labeling reaction using any number of common labeling techniques, such as the BioPrime Labeling kit (Invitrogen). In a further embodiment the USP can be labeled with a non-fluorescent moiety such as biotin, and then detected in subsequent post-hybridization assays using a fluorescent sandwiching technique such as avidin, followed by a fluorescent anti-avidin antibody technique

[0073] The label can be directly incorporated into the polynucleotide, or it can be attached to a molecule which hybridizes or binds to the polynucleotide. The labels may be coupled to the isolated polynucleotides by any means known to those of skill in the art. In a various embodiments, the isolated polynucleotides are labeled using nick translation, PCR, or random primer extension (see, e.g., Sambrook et al. supra). Methods for detecting the label include, but are not limited to spectroscopic, photochemical, biochemical, immunochemical, physical or chemical techniques.

[0074] The USP can be in lyophilized form, or in a solution comprising one or more of buffer solutions, hybridization solutions, and solutions for keeping the compositions in storage. Such a solution can be made as such, or the composition can be prepared at the time of use. Alternatively, the USP can be placed on a solid support, such as in a microarray, bead, nylon membrane, slide, or microplate format.

[0075] In a second aspect, the present invention provides unique sequence probes made by the methods of the invention, including but not limited to those disclosed herein. Such unique sequence probes can be used in any type of hybridization assay for a nucleic acid target of interest, including but not limited to in situ hybridization, fluorescent in situ hybridization, chromogenic in situ hybridization, and related techniques. The USP can be in lyophilized form, or in a solution comprising one or more of buffer solutions, hybridization solutions, and solutions for keeping the compositions in storage. Such a solution can be made as such, or the composition can be prepared at the time of use. Alternatively, the USP can be placed on a solid support, such as in a microarray, bead, nylon membrane, slide, or microplate format. In this alternative format, one skilled in the art will recognize that when the unique sequence probe is attached to a solid support and hybridized with a second detectable probe containing a repetitive sequence, competitor DNA will not be required in the hybridization because there will be no complementary repetitive sequences in the unique sequence probe attached to the solid support.

[0076] In a preferred embodiment of this second aspect of the invention, the unique sequence probe comprises or consists of a plurality of nucleic acids selected from the group consisting of SEQ ID NOS: 893-986 (SMARCE1 USP).

[0077] In a further preferred embodiment of this second aspect of the invention, the unique sequence probe comprises or consists of a plurality of nucleic acids selected from the group consisting of SEQ ID NOS: 987-1082 (PDCD6IP USP).

[0078] In a further preferred embodiment of this second aspect of the invention, the unique sequence probe comprises or consists of a plurality of nucleic acids selected from the group consisting of SEQ ID NOS: 1083-1154 (CYP24 USP).

[0079] In a further preferred embodiment of this second aspect of the invention, the unique sequence probe comprises or consists of a plurality of nucleic acids selected from the group consisting of SEQ ID NOS: 1155-1242 (NR1D1 USP).

[0080] In a further preferred embodiment of this second aspect of the invention, the unique sequence probe comprises or consists of a plurality of nucleic acids selected from the group consisting of SEQ ID NOS: 1243-1338 (BIRC5 USP).

[0081] As used in the second aspect, a plurality requires 2 or more of the recited nucleic acids. In each of these preferred embodiments of the second aspect of the invention, it is further preferred that the unique sequence probe comprises or consists of 3, 4, 5, 6, 7, 8, 9, 10, 11, 12, 13, 14, 15, 16, 17, 18, 19, 20, 21, 22, 23, 24, 25, 26, 27, 28, 29, 30, 31, 32, 33, 34, 35, 36, 37, 38, 39, 40, 41, 42, 43, 44, 45, 46, 47, 48, 49, 50, 51, 52, 53, 54, 55, 56, 57, 58, 59, 60, 61, 62, 63, 64, 65, 66, 67, 68, 69, 70, 71, 72, 73, 74, 75, 76, 77, 78, 79, 80, 81, 82, 83, 84, 85, 86, 87, 88, 89, 90, 91, 92, 93, 94, 95, or 96 of the recited nucleic acids.

[0082] In a third aspect, the present invention provides polynucleotide primer sets, wherein a “polynucleotide primer set” comprises or consists of a forward and reverse polynucleotide primer (“primer pair”) that are complementary to a given unique sequence element in a nucleic acid probe and can be used in a PCR to amplify a defined region of the given unique sequence element in the nucleic acid probe, wherein each polynucleotide primer in the primer set has an annealing temperature of between 52° C. and 65° C.; preferably between 55° C. and 63° C., and more preferably between 56° C. and 61° C., and wherein the polynucleotide primers in a polynucleotide primer set have an annealing temperature within 3′, 2′, 1′, or 0° C. of each other.

[0083] FIGS. 3-7 provide a large number of such primer pairs for specific nucleic acid probes. In these Figures, the forward and reverse polynucleotide primers for a given polynucleotide primer set are listed on the same row in the Table and are numbered. For example, SEQ ID NO:1 and SEQ ID NO:2 in FIG. 3 constitute primer pair #1 that can be used, for example, to amplify a defined region of SMARCE1. Those of skill in the art will recognize that many such primer pairs are provided in FIGS. 3-7.

[0084] In this third aspect, the polynucleotide primer set comprises or consists of 2, 3, 4, 5, 6, 7, 8, 9, 10, 11, 12, 13, 14, 15, 16, 17, 18, 19, 20, 21, 22, 23, 24, 25, 26, 27, 28, 29, 30, 31, 32, 33, 34, 35, 36, 37, 38, 39, 40, 41, 42, 43, 44, 45, 46, 47, 48, 49, 50, 51, 52, 53, 54, 55, 56, 57, 58, 59, 60, 61, 62, 63, 64, 65, 66, 67, 68, 69, 70, 71, 72, 73, 74, 75, 76, 77, 78, 79, 80, 81, 82, 83, 84, 85, 86, 87, 88, 89, 90, 91, 92, 93, 94, 95, or 96 of the primer pairs for a given nucleic acid probe (SMARCE1, PDCD6IP, CYP24, NR1D1, and BIRC5) selected from the group of primer pairs provided in FIGS. 3-7.

[0085] In a fourth aspect, the present invention provides kits comprising unique sequence probes according to the methods of the invention and instructions for their use in hybridization assays for a nucleic acid target of interest, including but not limited to in situ hybridization, fluorescent in situ hybridization, chromogenic in situ hybridization, and related techniques. In a preferred embodiment, the USPs in the kit are labeled as described above. The kits can comprise further components for use in hybridization assays, including but not limited to hybridization buffer, wash buffers, and control slides. In a further preferred embodiment, the kits comprise polynucleotide primer sets as disclosed herein, which can be used, for example, in generating USPs according to the methods of the invention.

[0086] In a fifth aspect, the present invention provides methods for detecting a nucleic acid target of interest, comprising:

[0087] (a) generating a unique sequence probe according to the methods of the invention for the nucleic acid target of interest;

[0088] (b) contacting the unique sequence probe to a specimen to be tested under conditions to promote hybridization of the unique sequence probe to the nucleic acid target; and

[0089] (c) detecting hybridization complexes formed between the unique sequence probe and the nucleic acid target, wherein such hybridization complexes provide a measure of the nucleic acid target in the specimen.

[0090] In this fifth aspect, generating unique sequence probes is as described above in the first aspect of the invention. Nucleic acid targets are also as defined above.

[0091] As used herein “contacting” includes the step of denaturing the target nucleic acids in the specimen and the USP and bringing them into contact to facilitate hybridization. Any techniques known in the art can be used for such contacting. For example, while the contacting can take place prior to addition of the hybridization solution (for example, in a separate denaturing solution), it is preferred that both denaturation of the target nucleic acid and probe, and hybridization occurs in the same solution. While the contacting of the specimen with the hybridization solution can occur simultaneously with or prior to contacting of the specimen with the labeled USP, it is preferred that the labeled probes are added to the hybridization solution and that denaturation of the target nucleic acid and the probes occurs simultaneously in the hybridization solution.

[0092] In a preferred embodiment, the methods utilize hybridization buffers disclosed in U.S. Pat. Nos. 5,750,340 and 6,022,689, incorporated by reference herein in their entirety.

[0093] As used herein, the “specimen” refers to any specimen on which detection of a nucleic acid target by hybridization to the USP is useful, including but not limited to genomic DNA, total RNA, mRNA, cDNA, cell and tissue samples; surgical specimens, blood samples, bone marrow samples, cerebral spinal fluid, and metaphase chromosomal spreads. In a preferred embodiment, the specimen is a cell sample, tissue sample, or metaphase chromosomal spread. Methods for preparing such cell, tissue, and chromosomal spread samples are well known in the art. In a preferred embodiment, the specimen is fixed on a platform, such as any substrate upon which ISH can be performed, including but not limited to glass or plastic slides, and multiwell tissue culture plates, and the USP is labeled and used as a probe against the specimen.

[0094] Alternatively, the USP can be arrayed on a solid support and nucleic acids from the specimen can be labeled and used to probe the arrayed USP. In this embodiment, the USP is not labeled. In this embodiment, further, competitor DNA is not required to disable repetitive sequences found in the probe, because there are no complementary repetitive sequences in the unique sequence probe attached to the solid support.

[0095] Conditions to promote hybridization can be any such as are known in the art. Any conditions in which the USP binds selectively to the nucleic acid target to form a hybridization complex, and minimally or not at all to other sequences, can be used in the methods of the present invention. The exact conditions used will depend on the length of the unique sequence elements in the USP, their GC content, as well as various other factors as is well known to those of skill in the art. (See, for example, Tijssen (1993) Laboratory Techniques in Biochemistry and Molecular Biology—Hybridization with Nucleic Acid Probes part I, chapt 2, “Overview of principles of hybridization and the strategy of nucleic acid probe assays,” Elsevier, N.Y. (“Tijssen”); and Fish: A Practical Approach, Barbara G. Beatty, Sabine Mai, and Jeremy A. Squire, editors. Oxford University Press, 2002.

[0096] Any desirable post-hybridization processing steps can be carried out. It is preferred that the specimens on the platform are dried, such as by air-drying, prior to detection. Optionally, the biological samples can be counterstained to detect cell structures, such as counterstaining with 4,6-diamidino-2-phenylindole (DAPI) or propidium iodide (PI) solution to stain nuclei.

[0097] Any method for detecting hybridization complexes can be used, such as by Southern blotting and Northern blotting methods, in situ hybridization, polymerase chain reaction (PCR) analysis, comparative genomic hybridization, or array based methods. In a preferred embodiment, detection is performed by in situ hybridization (“ISH”). In situ hybridization assays are well known to those of skill in the art. See, for example, U.S. Pat. Nos. 5,750,340 and 6,022,689, incorporated by reference herein in their entirety.

[0098] As discussed above, the labeled USP has a detectable moiety attached. The detectable moiety can be directly detectable, such as when a fluorescent-tagged nucleotide analog is covalently attached to the probe. Alternatively, the attached moiety can be detected in a secondary detection procedure, such as when a fluorescent tagged antibody specific to the attached moiety is added after the hybridization and wash procedures. Methods for detecting the label present in a hybridization complex include, but are not limited to spectroscopic, photochemical, biochemical, immunochemical, physical or chemical techniques. For example, useful labels include but are not limited to radioactive labels such as ³²P, ³H, and ¹⁴C; fluorescent dyes such as fluorescein isothiocyanate (FITC), rhodamine, lanthanide phosphors, and Texas red, Spectrum Dyes (Abbott Labs), ALEXIS™ (Molecular Probes), CY™ dyes (Amersham); electron-dense reagents such as gold; enzymes such as horseradish peroxidase, beta-galactosidase, luciferase, and alkaline phosphatase; calorimetric labels such as colloidal gold; magnetic labels such as those sold under the mark DYNABEADS™; biotin; dioxigenin; or haptens and proteins for which antisera or monoclonal antibodies are available. The label can be directly incorporated into the polynucleotide, or it can be attached to a probe or antibody which hybridizes or binds to the polynucleotide. The labels may be coupled to the probes by any means known to those of skill in the art. In a various embodiments, the probes are labeled using nick translation, PCR, TAQMAN™, or random primer extension (see, e.g., Sambrook et al. supra).

[0099] Signals from the labeled probes can be detected by any means known in the art for the particular label employed. For example, where the detectable label is a fluorescent label, one can detect fluorescence signals by visualization with a fluorescence microscope.

### EXAMPLES

[0100] The complete DNA sequence containing the genomic region of interest is obtained. Clones containing the sequence of interest can include but are not limited to cDNA clones, lambda, cosmid, or clones, or large insert clones such as YACs, BACs or P1s. Complete DNA sequences of clones can be obtained using a variety of manual or automated DNA sequencing protocols. The following describes the procedure for obtaining the unique sequence of, for example, BAC clones. A common source for sequences of BAC clones can be obtained at the UCSC Genome Bioinformatics database (http://genome.ucsc.edu/index.html?org=Human). The public database can also be used as a source of DNA sequence information for any genomic region of interest. The repetitive elements of the BACs can be identified using the “Mask Repeat” function at the UCSC Genome Bioinformatics database, and repeat-free sequences of the BACs can then obtained using the “Get DNA” function. PCR primers flanking each unique sequence component are then designed, using either a manual approach or a computational approach. Several software programs area available for primer design, both commercially and in web-based format, such as “Fast PCR” (http://www.biocenter.helsinki.fi/bi/bare-1_html/oligos.htm). These programs calculate the melting temperatures and identify potential problems such as self annealing hairpin loop formation and primer-dimerization. For a typical BAC, the number of primer pairs for amplification required to amplify the entire unique sequence component of the clones ranges from 50 to 100 or more.

[0101] To demonstrate the present invention, 5 BAC DNAs were selected. The BACs contain the genes for NR1D1, SMARCE1, BIRC5, CYP24A, and PDCD6IP. The BACs were selected from the “32K human genome BAC Rearray”, maintained at the CHORI (http://bacpac.chori.org/). The sizes of the BACS in this example range from 154-178 kb. Names, sizes, and chromosome locations of the individual BACs are summarized in Table 1.

TABLE 1

| Clone | Size of BAC (kb) | Chromosome Location |
|---|---|---|
| PDCD6IP | 150.4 | 3p23 |
| SMARCE1 | 180.8 | 17q21.2 |
| BIRC5 | 177.6 | 17q25.3 |
| NR1D1 | 162.0 | 17q21.1 |
| CYP24 | 180.9 | 20q13.2 |

[0102] The repetitive elements of the BACs were identified using the “Mask Repeat” function at the UCSC Genome Bioinformatics database, and repeat-free sequences of the BACs were obtained using the “Get DNA” function (http://genome.ucsc.edu/index.html?org=Human).

[0103] The sequence of the related BAC clone for each marker was down loaded from Human UCSC Genome browser with the repetitive sequences marked. Primers were selected from both ends of a unique sequence area of no less than 300 bp length. Primers were designed for each BAC using the “Fast PCR” program.

[0104] The selected primers were as follows (used in primer pairs as noted in FIGS. 3-7):

[0105] a) SMARCE1 primers: SEQ ID NOS:1-188;

[0106] b) PDCD6IP primers: SEQ ID NOS: 189-380;

[0107] c) CYP24 primers: SEQ ID NOS: 381-524;

[0108] d) NR1D1 primers: SEQ ID NOS: 525-700; and

[0109] e) BIRC5 primers: SEQ ID NOS: 701-892.

[0110] PCR was carried out as follows:

[0111] PCR Master Mix from Promega (Catalog # M7505) was used for PCR. Reaction buffer: 25 units/ml of Taq DNA Polymerase, in manufacturer's proprietary reaction buffer −(pH 8.5), 200 uM dATP, 200 uM dGTP, 200 uM dCTP, 200 uM dTTP, 1.5 mM MgCl₂.

[0112] Cycling conditions:
[0113] 1. 5 minutes at 95° C.;
[0114] 2. 15 seconds at 95° C.;
[0115] 3. 30 seconds at 56° C.; (This temperature varies depending on the annealing temperature of the primer.)
[0116] 4. 2 minutes at 72° C.;
[0117] 5. go to step 2 for 30 times;
[0118] 6. 3 minutes at 72° C.;

[0119] Primer concentration was 1 uM.

[0120] Template concentration:

[0121] The BAC clone concentration for the first run PCR was between 0.3 and 0.5 ng/ul. For the second run PCR (see below for: “second run PCR”), 1/100 volume of the first run PCR reaction mix was used as template and concentration was not determined.

[0122] For a 50 ul first run PCR reaction, mix:

0.3 ul BAC template (56 ng/ul);

5 ul forward primer (10 uM);

5 ul reverse primer (10 uM);

25 ul 2×PCR master mix;

14.7 ul sterile dH₂O

[0123] And run through the above cycle and store at −20° C.

[0124] For a 50 ul second run PCR reaction, mix

0.5 ul first run PCR product;

5 ul forward primer (10 uM);

5 ul reverse primer (10 uM);

25 ul 2×PCR master mix;

14.5 ul sterile dH₂O

[0125] And run through the above cycle and store at −20° C.

[0126] The melting temperature for all the primers used ranged from 57° to 60° C. Analytical agarose gels demonstrating amplified PCR products showed that 98-99% of the reactions were successful.

[0127] The numbers of primers pairs for each BAC, the average length of the PCR products, and the total coverage of the original BAC included in the unique sequence probe are summarized in Table 2.

TABLE 2

| | Complete | | | Number | Average | | % complete | |
|---|---|---|---|---|---|---|---|---|
| | sequence | Unique | % unique | of PCR | size of PCR | Amplified | sequence | % unique |
| | of clone | sequence | sequence | primer | products | sequence | in clone | sequence |
| Clone | (bp) | in clone(bp) | in clone | pairs | (bp) | (bp) | amplified | amplified |
| PDCD6IP | 150437 | 77036 | 51.2 | 96 | 1240 | 59000 | 39.2 | 76.6 |
| SMARCE1 | 180862 | 105440 | 58.3 | 94 | 1720 | 79000 | 43.7 | 74.9 |
| BIRC5 | 177623 | 97050 | 54.6 | 96 | 814 | 76000 | 42.8 | 78.3 |
| NR1D1 | 161994 | 95161 | 58.7 | 88 | 925 | 80000 | 49.4 | 84.1 |
| CYP24 | 180862 | 105440 | 58.3 | 72 | 877 | 62000 | 34.3 | 58.8 |

[0128] Sequences of the resulting PCR products are provided as follows:

[0129] (a) SMARCE 1 USP: SEQ ID NOS: 893-986

[0130] (b) PDCD6IP USP: SEQ ID NOS: 987-1082

[0131] (c) CYP24 USP: SEQ ID NOS:1083-1154

[0132] (d) NR1D1 USP: SEQ ID NOS: 1155-1242; and

[0133] (e) BIRC5 USP: SEQ ID NOS: 1243-1338.

[0134] The PCR products were purified from the un-extended primers and pooled, and then aliquots of each pool were labeled with at least one of four fluorochromes: Spectrum Orange, Spectrum Green, Spectrum Red (Vysis) or DEAC (diethylaminocoumarin-5-dUTP, PerkinElmer) using Invitrogen's BioPrime DNA Labeling Kit, according to manufacturer's instructions. Unincorporated fluorochromes were purified using YM-30 microcon columns (Millipore).

[0135] Probes were hybridized either alone, in pairs, or in triplets (ie: for 1, 2, or 3 nucleic acid targets; and thus 1, 2, or 3 different USPs) to metaphase chromosomes or to breast cancer thin sections, or to sectioned tissue culture cell lines sectioned from paraffin blocks. The hybridization buffer was 20% formamide, 10% dextransulfate, 0.9% NaCl. The probes concentrations were 40 ng/μl if labeled with Spectrum Orange, Texas Red, or DEAC Aqua, and 60 ng/μl for the Spectrum Green. The specimens were hybridized at 38° C. for 14-20 hours. After hybridization, the slides were washed with 0.15% NaCl at 60° C. for 10 minutes.

[0136] For each example, the original BAC and its derivative USP were labeled with one of the four fluorochromes co-hybridized on metaphase chromosomes. In each pair of dual labeled probes. Competitor DNA was included in these co-hybridizations in order to suppress the repetitive sequences contained in the parental BACs. In each of the pairs, the probes co-hybridize with equal intensity to the expected chromosome region, without hybridization to any other chromosome region, and without any specific or non specific background or artifactual hybridization to any other chromosome regions. These dual hybridizations demonstrate that there is no loss of specificity or signal quality between the labeled parental BAC and its derivative USP.

[0137] On metaphase chromosomes, the signal intensities for all probes were equal for all five probes, regardless of the fluorochrome. In all cases bright, strong signals were clearly visible on the correct chromosome, without any artifactual signal on other chromosomes. There was no background hybridization randomly distributed throughout the genome, nor were there any areas of diffuse non-specific hybridization.

[0138] Multiplex hybridization of probe triplets was also tested on 5 uM formalin-fixed, paraffin embedded, interphase breast adenocarcinoma cell line thin sections. In these hybridizations, clear distinct hybridization signals were seen, in the three unique colors expected for the fluorochromes used, without artifactual signals or interfering background. Thus there is no loss of signal quality or intensity whether the probes were hybridized singly or in triplets.

[0139] Probe quality and signal strength were not dependent on particular pairs of probes and fluorochromes. Pair-wise combinations of fluorochromes and probes that have been tested are summarized in Table 3.

| | Spectrum | Texas | Spectrum | DEAC |
|---|---|---|---|---|
| Clone | Orange | Red | Green | Aqua |
| NR1D1 | ++++ | | | |
| SMARCE1 | | ++++ | ++++ | |
| BIRC5 | ++++ | | ++++ | ++++ |
| CYP24 | ++++ | ++++ | ++++ | ++++ |
| PDCD6IP | ++++ | | ++++ | |

We claim:

1. A method for preparing unique sequence probes comprising:
(a) identifying unique sequence elements contained in a nucleic acid probe, wherein the nucleic acid probe comprises a plurality of unique sequence elements and a plurality of repetitive sequence elements, and wherein the unique sequence elements in the nucleic acid probe selectively bind to a nucleic acid target of interest;
(b) amplifying unique sequence elements in the nucleic acid probe to generate amplified unique sequence elements, wherein the amplifying comprises
(i) contacting the nucleic acid probe with primer sets for a plurality of unique sequence elements under conditions to promote hybridization of the primer sets to the nucleic acid probe, wherein each primer in the plurality of primer sets has an annealing temperature of between 52° C. and 65° C., and wherein the annealing temperature for all of the primers in the plurality of primer sets are within 3° C. of each other; and
(ii) amplifying unique sequence elements defined by the primer sets in by polymerase chain reaction under conditions that comprise annealing the plurality of primer sets to the nucleic acid probe at a temperature between 51° C. and 65° C.; and
(c) pooling the amplified unique sequence elements to produce the unique sequence probe.

2. The method of claim 1 wherein the contacting comprises contacting the nucleic acid probe with at least 10 primer sets for at least 10 unique sequence elements in the nucleic acid probe, and wherein the amplifying unique sequence elements comprises amplifying the at least 10 unique sequence elements.

3. The method of claim 1 wherein the contacting comprises contacting the nucleic acid probe with at least 50 primer sets for at least 50 unique sequence elements in the nucleic acid probe, and wherein the amplifying unique sequence elements comprises amplifying the at least 50 unique sequence elements.

4. The method of claim 1 further comprising labeling the unique sequence probe.

5. The method of claim 1 wherein the contacting of the nucleic acid probe with the primer sets comprises separately contacting each individual primer set with the nucleic acid probe, and the amplifying comprises amplifying each unique sequence element in a separate polymerase chain reaction.

6. The method of claim 5 wherein the separate polymerase chain reactions are conducted simultaneously.

7. The method of claim 1, further comprising placing the unique sequence probe on a solid support.

8. A unique sequence probe made by the method of claim 1 and selected from the group consisting of:
(a) at least 50 nucleic acids selected from the group consisting of SEQ ID NOS: 893-986;
(b) at least 50 nucleic acids selected from the group consisting of SEQ ID NOS: 987-1082;
(c) at least 50 nucleic acids selected from the group consisting of SEQ ID NOS: 1083-1154;
(d) at least 50 nucleic acids selected from the group consisting of SEQ ID NOS: 1155-1242; and
(e) at least 50 nucleic acids selected from the group consisting of SEQ ID NOS: 1243-1338.

9. A unique sequence probe selected from the group consisting of:
(a) at least 50 nucleic acids selected from the group consisting of SEQ ID NOS: 893-986;
(b) at least 50 nucleic acids selected from the group consisting of SEQ ID NOS: 987-1082;
(c) at least 50 nucleic acids selected from the group consisting of SEQ ID NOS: 1083-1154;
(d) at least 50 nucleic acids selected from the group consisting of SEQ ID NOS: 1155-1242; and
(e) at least 50 nucleic acids selected from the group consisting of SEQ ID NOS: 1243-1338.

10. Isolated polynucleotide primer sets selected from the group consisting of
(a) at least 1 isolated polynucleotide primer set selected from polynucleotide primer sets 1-94 listed in FIG. 3;
(b) at least 1 isolated polynucleotide primer set selected from polynucleotide primer sets 1-96 listed in FIG. 4;
(c) at least 1 isolated polynucleotide primer set selected from polynucleotide primer sets 1-72 listed in FIG. 5;
(d) at least 1 isolated polynucleotide primer set selected from polynucleotide primer sets 1-88 listed in FIG. 6; and
(e) at least 1 isolated polynucleotide primer set selected from polynucleotide primer sets 1-96 listed in FIG. 7.

11. The isolated polynucleotide primer set of claim 10, selected from the group consisting of
(a) at least 25 isolated polynucleotide primer set selected from polynucleotide primer sets 1-94 listed in FIG. 3;
(b) at least 25 isolated polynucleotide primer set selected from polynucleotide primer sets 1-96 listed in FIG. 4;
(c) at least 25 isolated polynucleotide primer set selected from polynucleotide primer sets 1-72 listed in FIG. 5;
(d) at least 25 isolated polynucleotide primer set selected from polynucleotide primer sets 1-88 listed in FIG. 6; and
(e) at least 25 isolated polynucleotide primer set selected from polynucleotide primer sets 1-96 listed in FIG. 7.

12. A kit comprising the unique sequence probe of claim 8 and instructions for its use in hybridization assays.

13. A method for detecting a nucleic acid target of interest, comprising:
(a) generating a unique sequence probe according to the method of claim 1;
(b) contacting the unique sequence probe to a specimen to be tested under conditions to promote hybridization of the unique sequence probe to the nucleic acid target; and
(c) detecting hybridization complexes formed between the unique sequence probe and the nucleic acid target, wherein such hybridization complexes provide a measure of the nucleic acid target in the specimen.

The application's sequence listing, which the Patent Office published only in electronic form, follows.

SEQUENCE LISTING (1338 sequences)

SEQ ID NO: 1 - DNA, 22 bp, Homo sapiens
agctagcatagactccccacag

SEQ ID NO: 2 - DNA, 23 bp, Homo sapiens
acaatggtgcccattcaaatgac

SEQ ID NO: 3 - DNA, 21 bp, Homo sapiens
atgggcaccattgtgtccaag

SEQ ID NO: 4 - DNA, 24 bp, Homo sapiens
aacaggtaccctagagtccattcc

SEQ ID NO: 5 - DNA, 19 bp, Homo sapiens
tcccactatgccaggctgc

SEQ ID NO: 6 - DNA, 22 bp, Homo sapiens
tcttcatcctggtgagccatcc

SEQ ID NO: 7 - DNA, 18 bp, Homo sapiens
ggaaggagggcttggcac

SEQ ID NO: 8 - DNA, 26 bp, Homo sapiens
gtacaatttcggttgtgaatgtgcag

SEQ ID NO: 9 - DNA, 17 bp, Homo sapiens
cagcccgcagcaggttc

SEQ ID NO: 10 - DNA, 22 bp, Homo sapiens
ggtttggggaggtaagggaagc

SEQ ID NO: 11 - DNA, 17 bp, Homo sapiens
ttgcaggtgggtgccct

SEQ ID NO: 12 - DNA, 17 bp, Homo sapiens
gagcggagcaccagcgt

SEQ ID NO: 13 - DNA, 24 bp, Homo sapiens
tttagtccacttagggcatgggtg

SEQ ID NO: 14 - DNA, 20 bp, Homo sapiens
ggtctccgatccttctcacc

SEQ ID NO: 15 - DNA, 20 bp, Homo sapiens
atgtgtcaccgccttgtcag

SEQ ID NO: 16 - DNA, 19 bp, Homo sapiens
ttccctgactgggtccggt

SEQ ID NO: 17 - DNA, 23 bp, Homo sapiens
gattagccaagactgggatggag

SEQ ID NO: 18 - DNA, 19 bp, Homo sapiens
acttgtgctctctccctgc

SEQ ID NO: 19 - DNA, 25 bp, Homo sapiens
aataaagtcttaggagccttgcgag

SEQ ID NO: 20 - DNA, 24 bp, Homo sapiens
ccttccagcaaatgaccttctctg

SEQ ID NO: 21 - DNA, 26 bp, Homo sapiens
tgttttgcaaccattcaccacatgac

SEQ ID NO: 22 - DNA, 17 bp, Homo sapiens
agaggccgactgtgccg

SEQ ID NO: 23 - DNA, 17 bp, Homo sapiens
ccctcagaggcctgctg

SEQ ID NO: 24 - DNA, 18 bp, Homo sapiens
tgcaccaacacgctgtcc

SEQ ID NO: 25 - DNA, 23 bp, Homo sapiens
gcacgcttcattctgatccagtg

SEQ ID NO: 26 - DNA, 17 bp, Homo sapiens
atgggcctcggagtgca

SEQ ID NO: 27 - DNA, 17 bp, Homo sapiens
tgcactccgaggcccat

SEQ ID NO: 28 - DNA, 22 bp, Homo sapiens
tgtccatcttcccaccctactg

SEQ ID NO: 29 - DNA, 29 bp, Homo sapiens
agtacctagtagcagataattcagggctg

SEQ ID NO: 30 - DNA, 26 bp, Homo sapiens
tagaggaggtgtctacacaagtggca

SEQ ID NO: 31 - DNA, 19 bp, Homo sapiens
ttgggcctgaatcccatcc

SEQ ID NO: 32 - DNA, 19 bp, Homo sapiens
gtgggtgttttcagccagg

SEQ ID NO: 33 - DNA, 24 bp, Homo sapiens
aaccacagccacctagactctgac

SEQ ID NO: 34 - DNA, 28 bp, Homo sapiens
gtgatcttgggcttgagttgatcaatca

SEQ ID NO: 35 - DNA, 18 bp, Homo sapiens
ttaggggacctgggacca

SEQ ID NO: 36 - DNA, 26 bp, Homo sapiens
acttctcctgtctgtaaacaaggctg

SEQ ID NO: 37 - DNA, 28 bp, Homo sapiens
ccatctgacttaattccctcatcaactg

SEQ ID NO: 38 - DNA, 28 bp, Homo sapiens
cagctgggaattaagttaatccacttga

SEQ ID NO: 39 - DNA, 26 bp, Homo sapiens
tcttctggaatgggctaatcagtttg

SEQ ID NO: 40 - DNA, 24 bp, Homo sapiens
tgtgattacagaggagacacacct

SEQ ID NO: 41 - DNA, 33 bp, Homo sapiens
tgagagttagtctgtagtgctatggattaaacg

SEQ ID NO: 42 - DNA, 36 bp, Homo sapiens
aaacttacataaagtactgattacattgatcgtcac

SEQ ID NO: 43 - DNA, 24 bp, Homo sapiens
atgctgtcctaggacaccaaagac

SEQ ID NO: 44 - DNA, 27 bp, Homo sapiens
ttggtacactgtttgaaagtatggacc

SEQ ID NO: 45 - DNA, 26 bp, Homo sapiens
ggtccatactttcaaacagtgtacca

SEQ ID NO: 46 - DNA, 31 bp, Homo sapiens
cgaaacagaagcatataaaccagacccatac

SEQ ID NO: 47 - DNA, 22 bp, Homo sapiens
caaacgctcctctctgaaccac

SEQ ID NO: 48 - DNA, 22 bp, Homo sapiens
gagggcatgtgcaattatccac

SEQ ID NO: 49 - DNA, 28 bp, Homo sapiens
agaagtcagtagctgttgtacttcatgc

SEQ ID NO: 50 - DNA, 32 bp, Homo sapiens
acaatgaatctatgaaggcctatcataattcc

SEQ ID NO: 51 - DNA, 21 bp, Homo sapiens
agcctcagtactgcatcagtg

SEQ ID NO: 52 - DNA, 40 bp, Homo sapiens
aggtctatacgtttagacatcagtattaacatttcatctg

SEQ ID NO: 53 - DNA, 33 bp, Homo sapiens
ataagcaagaatatctccaatcactacagacac

SEQ ID NO: 54 - DNA, 22 bp, Homo sapiens
aagtgaaggaggactgcaagac

SEQ ID NO: 55 - DNA, 26 bp, Homo sapiens
tggacctttcctctgaatatgcacag

SEQ ID NO: 56 - DNA, 29 bp, Homo sapiens
tggaatggagcttcttgatataagacctc

SEQ ID NO: 57 - DNA, 28 bp, Homo sapiens
tgatcagtttttcctgtggcttaaagtc

SEQ ID NO: 58 - DNA, 25 bp, Homo sapiens
ttgacatctgacagagggttacagc

SEQ ID NO: 59 - DNA, 23 bp, Homo sapiens
gctgtaaccctctgtcagatgtc

SEQ ID NO: 60 - DNA, 28 bp, Homo sapiens
atgtgccatgcatatttcatggtatctg

SEQ ID NO: 61 - DNA, 26 bp, Homo sapiens
cagataccatgaaatatgcatggcac

SEQ ID NO: 62 - DNA, 29 bp, Homo sapiens
tcctcgtttgagctcatttctcattcgtg

SEQ ID NO: 63 - DNA, 28 bp, Homo sapiens
cacgaatgagaaatgagctcaaacgagg

SEQ ID NO: 64 - DNA, 28 bp, Homo sapiens
caaatgtaccgctgcaagtaatatacac

SEQ ID NO: 65 - DNA, 41 bp, Homo sapiens
aggaagaagaataattcatttagtatccattctgttggatg

SEQ ID NO: 66 - DNA, 31 bp, Homo sapiens
agtgtctcagattcattcttaaggaactgag

SEQ ID NO: 67 - DNA, 27 bp, Homo sapiens
ctcagcaagcatacgagaatgttttcc

SEQ ID NO: 68 - DNA, 33 bp, Homo sapiens
ctctcaaaatttattcccagcatttatgaagct

SEQ ID NO: 69 - DNA, 28 bp, Homo sapiens
aggacctagctcaattcttaggaaattt

SEQ ID NO: 70 - DNA, 26 bp, Homo sapiens
aacgtacagggagcttatgttagttg

SEQ ID NO: 71 - DNA, 21 bp, Homo sapiens
tgaaccaatgggggaaccttc

SEQ ID NO: 72 - DNA, 18 bp, Homo sapiens
agaccaggtggcacccgc

SEQ ID NO: 73 - DNA, 17 bp, Homo sapiens
ggcagccctctgtgcca

SEQ ID NO: 74 - DNA, 33 bp, Homo sapiens
tcatgtacattttctcaagcaccactcaagctg

SEQ ID NO: 75 - DNA, 31 bp, Homo sapiens
ccatcagagacatgtaaaggattaaagtacg

SEQ ID NO: 76 - DNA, 29 bp, Homo sapiens
cagtgagaaagtgtatcagacaatgtcac

SEQ ID NO: 77 - DNA, 28 bp, Homo sapiens
ctgaagagtgaattatccagcaagatgg

SEQ ID NO: 78 - DNA, 24 bp, Homo sapiens
aacaatctcgtttggctactgtgc

SEQ ID NO: 79 - DNA, 34 bp, Homo sapiens
gtagtggaatcattaccttggtaaattcatatcc

SEQ ID NO: 80 - DNA, 32 bp, Homo sapiens
ctttcaattacttcagattccttttagtctgg

SEQ ID NO: 81 - DNA, 27 bp, Homo sapiens
aaggctgtactaaaatgctaacgtagc

SEQ ID NO: 82 - DNA, 33 bp, Homo sapiens
aactcatggaagagtactgaatccttactttgc

SEQ ID NO: 83 - DNA, 45 bp, Homo sapiens
tgtttggaaacatttaaacaaagaagagtaattactgggattacg

SEQ ID NO: 84 - DNA, 39 bp, Homo sapiens
ttctttctgatttcagatattatggttgtatccaaggtg

SEQ ID NO: 85 - DNA, 38 bp, Homo sapiens
tgtcaagatttattataggctaaagttgtttcacctag

SEQ ID NO: 86 - DNA, 31 bp, Homo sapiens
agacctttcctaactttctcactttccttgc

SEQ ID NO: 87 - DNA, 25 bp, Homo sapiens
gttctaggtgactttggctgtttgg

SEQ ID NO: 88 - DNA, 32 bp, Homo sapiens
cagaaacacattctgtgttactgattcactga

SEQ ID NO: 89 - DNA, 20 bp, Homo sapiens
tcgacgtctcaatggcatgg

SEQ ID NO: 90 - DNA, 26 bp, Homo sapiens
acataggagaaaacgggctaagaacg

SEQ ID NO: 91 - DNA, 27 bp, Homo sapiens
acatgaatgaaaacagtttgcaggacc

SEQ ID NO: 92 - DNA, 37 bp, Homo sapiens
tgctacaatcaattctatacattgttctcactgttcc

SEQ ID NO: 93 - DNA, 23 bp, Homo sapiens
gtcatgccccaagacgattgagg

SEQ ID NO: 94 - DNA, 28 bp, Homo sapiens
tgtcaggcctttattccattagccactc

SEQ ID NO: 95 - DNA, 30 bp, Homo sapiens
gctgtatttcagggtttggaagataacttg

SEQ ID NO: 96 - DNA, 22 bp, Homo sapiens
aactccccctcccctcaaagtg

SEQ ID NO: 97 - DNA, 20 bp, Homo sapiens
ccctgcatatctgcctctgc

SEQ ID NO: 98 - DNA, 27 bp, Homo sapiens
ctctctgtgtttcaggcggatattagc

SEQ ID NO: 99 - DNA, 22 bp, Homo sapiens
aggacattttgtgtgggccctg

SEQ ID NO: 100 - DNA, 28 bp, Homo sapiens
gcaagaaaggataaatgcaagtgcaagg

SEQ ID NO: 101 - DNA, 32 bp, Homo sapiens
tggagggtacattttagcacatttgggaagac

SEQ ID NO: 102 - DNA, 29 bp, Homo sapiens
aactcaactgtacacttctggaacaccag

SEQ ID NO: 103 - DNA, 26 bp, Homo sapiens
cccattggcttcacagaagagatagc

SEQ ID NO: 104 - DNA, 32 bp, Homo sapiens
tccaattctcaaacagtgttgatatcagtgac

SEQ ID NO: 105 - DNA, 35 bp, Homo sapiens
ccagttctctttgataaattctcagtgttaacgac

SEQ ID NO: 106 - DNA, 26 bp, Homo sapiens
aaaggtatgagtcactcgttttgtgg

SEQ ID NO: 107 - DNA, 26 bp, Homo sapiens
tgtgcctcatacctcaaaagagatgg

SEQ ID NO: 108 - DNA, 36 bp, Homo sapiens
ttctatccacatgacaaacatttagaatcagagtgc

SEQ ID NO: 109 - DNA, 21 bp, Homo sapiens
tttactggcctctttggccca

SEQ ID NO: 110 - DNA, 40 bp, Homo sapiens
tgtagctaacataaagtattaactacaattctgactgaat

SEQ ID NO: 111 - DNA, 29 bp, Homo sapiens
tgcatctttcttcagtctatctcctttcc

SEQ ID NO: 112 - DNA, 20 bp, Homo sapiens
tcaatgccccattccagctc

SEQ ID NO: 113 - DNA, 28 bp, Homo sapiens
ttatccttactgaatgaaccctgtggag

SEQ ID NO: 114 - DNA, 26 bp, Homo sapiens
ttcctacaccatagggatgcactagg

SEQ ID NO: 115 - DNA, 41 bp, Homo sapiens
aaggagcatatatacttcttgatattcaatgaaatcctagc

SEQ ID NO: 116 - DNA, 22 bp, Homo sapiens
tctttccctgggtgaaaacacc

SEQ ID NO: 117 - DNA, 32 bp, Homo sapiens
ccactcagggagagatttttatgtaccaagtc

SEQ ID NO: 118 - DNA, 27 bp, Homo sapiens
acctcagggaagcacattatttacgag

SEQ ID NO: 119 - DNA, 30 bp, Homo sapiens
tcatcatgctgctaagggtaactatatcac

SEQ ID NO: 120 - DNA, 29 bp, Homo sapiens
gcagagatgaaacagccacattatcaacc

SEQ ID NO: 121 - DNA, 23 bp, Homo sapiens
aaggcgcagaaaatgcctttagg

SEQ ID NO: 122 - DNA, 26 bp, Homo sapiens
ttcctatgattgcaaaaggaaccgca

SEQ ID NO: 123 - DNA, 27 bp, Homo sapiens
cttcatgtttgttgtcagtgcagtgag

SEQ ID NO: 124 - DNA, 20 bp, Homo sapiens
aagagctgggggaagacgac

SEQ ID NO: 125 - DNA, 28 bp, Homo sapiens
agtttcctccagttgctactactgtgag

SEQ ID NO: 126 - DNA, 32 bp, Homo sapiens
caagttaaagctccatctcctaattccatgag

SEQ ID NO: 127 - DNA, 22 bp, Homo sapiens
gcatgcaatgcacatcctatcg

SEQ ID NO: 128 - DNA, 19 bp, Homo sapiens
tcgcacatgggttttcacc

SEQ ID NO: 129 - DNA, 23 bp, Homo sapiens
ttgcctggagagctgaactttag

SEQ ID NO: 130 - DNA, 26 bp, Homo sapiens
tggcatcacataagaactcagtggca

SEQ ID NO: 131 - DNA, 29 bp, Homo sapiens
agtcatgcagctagatcatacttgatagc

SEQ ID NO: 132 - DNA, 18 bp, Homo sapiens
gcggaggctttctcctgc

SEQ ID NO: 133 - DNA, 47 bp, Homo sapiens
tgtgtctgttactttattactctctatatatacaagtctaagccctg

SEQ ID NO: 134 - DNA, 32 bp, Homo sapiens
tctaagtgaatttcccacatactatgaccagg

SEQ ID NO: 135 - DNA, 37 bp, Homo sapiens
atttgtatagaatgcatatggggagaaatatgttagc

SEQ ID NO: 136 - DNA, 35 bp, Homo sapiens
ctagaggatcatgacctaaatttacaaacatccca

SEQ ID NO: 137 - DNA, 29 bp, Homo sapiens
tgtgctattagcttttaaaggtgacttgc

SEQ ID NO: 138 - DNA, 17 bp, Homo sapiens
ccagcagctgcagcctg

SEQ ID NO: 139 - DNA, 18 bp, Homo sapiens
ctcctcctcggaagccct

SEQ ID NO: 140 - DNA, 29 bp, Homo sapiens
agacactattaaaccggtgaagtgactag

SEQ ID NO: 141 - DNA, 29 bp, Homo sapiens
acaggtgcttccagaaatagtttgtatcc

SEQ ID NO: 142 - DNA, 21 bp, Homo sapiens
acgtgctttcagccaaatgca

SEQ ID NO: 143 - DNA, 29 bp, Homo sapiens
agagagagagagacagactgaatcttagg

SEQ ID NO: 144 - DNA, 24 bp, Homo sapiens
ctgtctgccacagaaagttttgtc

SEQ ID NO: 145 - DNA, 27 bp, Homo sapiens
gatgtgtgaacagtctctttgcaatgc

SEQ ID NO: 146 - DNA, 30 bp, Homo sapiens
atgttgtgttatagttctggtggacagagg

SEQ ID NO: 147 - DNA, 25 bp, Homo sapiens
ccacatataaggcaatggcagcact

SEQ ID NO: 148 - DNA, 27 bp, Homo sapiens
gagaagctggtaaatgaagggttggag

SEQ ID NO: 149 - DNA, 21 bp, Homo sapiens
atggggacatcagctctcgga

SEQ ID NO: 150 - DNA, 26 bp, Homo sapiens
ttagaacaatgtgccactgacacagg

SEQ ID NO: 151 - DNA, 31 bp, Homo sapiens
gacaaagattgatgtagttgatttgcaacag

SEQ ID NO: 152 - DNA, 29 bp, Homo sapiens
tggccaaagagaagtaactgacaacaatc

SEQ ID NO: 153 - DNA, 21 bp, Homo sapiens
aaggaactaacgcccagtgtc

SEQ ID NO: 154 - DNA, 34 bp, Homo sapiens
aggaattgctatatggttacagtagtactctctg

SEQ ID NO: 155 - DNA, 31 bp, Homo sapiens
agccaacattttgctagcttgcttcaaacag

SEQ ID NO: 156 - DNA, 31 bp, Homo sapiens
gaatttcaacttgagctggatgtcagtggac

SEQ ID NO: 157 - DNA, 24 bp, Homo sapiens
gaagtcatctgctgcaagtccagc

SEQ ID NO: 158 - DNA, 25 bp, Homo sapiens
gagagaagatgtgcctaccacacag

SEQ ID NO: 159 - DNA, 25 bp, Homo sapiens
acatcaaatggagagcgcagagcac

SEQ ID NO: 160 - DNA, 35 bp, Homo sapiens
aggaattcatctgccttcctttaagttcttcatcc

SEQ ID NO: 161 - DNA, 22 bp, Homo sapiens
cagtggggagaaacccttcatg

SEQ ID NO: 162 - DNA, 25 bp, Homo sapiens
tggaataggtgccccacttatgatg

SEQ ID NO: 163 - DNA, 19 bp, Homo sapiens
tggctggaccaaatccctg

SEQ ID NO: 164 - DNA, 20 bp, Homo sapiens
ccctcattgcctctcacagc

SEQ ID NO: 165 - DNA, 23 bp, Homo sapiens
aagtcccctgaggtacagggctt

SEQ ID NO: 166 - DNA, 27 bp, Homo sapiens
aactcaaccccttgaaagttattccac

SEQ ID NO: 167 - DNA, 36 bp, Homo sapiens
gccagtgtttgttttcttaagttctgtctctagacg

SEQ ID NO: 168 - DNA, 20 bp, Homo sapiens
agcatctgctgagttcctgc

SEQ ID NO: 169 - DNA, 27 bp, Homo sapiens
aacatacccctatagaatggagctcag

SEQ ID NO: 170 - DNA, 28 bp, Homo sapiens
ggtgaatgacaattctccctactttacc

SEQ ID NO: 171 - DNA, 25 bp, Homo sapiens
cttcagtgttgccttctctgacaag

SEQ ID NO: 172 - DNA, 26 bp, Homo sapiens
agctcatagggctgataagtagccac

SEQ ID NO: 173 - DNA, 26 bp, Homo sapiens
tcccctagattcacactcccatagga

SEQ ID NO: 174 - DNA, 17 bp, Homo sapiens
gggtcggaggaacccag

SEQ ID NO: 175 - DNA, 28 bp, Homo sapiens
tcatgtctatctgcatcctcatccactg

SEQ ID NO: 176 - DNA, 27 bp, Homo sapiens
actcaggatagtgatgacacctgagca

SEQ ID NO: 177 - DNA, 28 bp, Homo sapiens
tagttgcttccagtaggagaaccagttg

SEQ ID NO: 178 - DNA, 23 bp, Homo sapiens
aggtcacagctgtgatgagtcag

SEQ ID NO: 179 - DNA, 28 bp, Homo sapiens
gtggtgtaaattgcttcagcacttagac

SEQ ID NO: 180 - DNA, 34 bp, Homo sapiens
gtttagaatccaagttacaggaatagagccatcc

SEQ ID NO: 181 - DNA, 40 bp, Homo sapiens
ctttagttattactaaagggaataggcttcttagtatgtc

SEQ ID NO: 182 - DNA, 34 bp, Homo sapiens
tgcatagcttgattgttcttatattaccatggct

SEQ ID NO: 183 - DNA, 21 bp, Homo sapiens
ctgctcctaacaaccctgagc

SEQ ID NO: 184 - DNA, 26 bp, Homo sapiens
agactttccatgagattcctgcagag

SEQ ID NO: 185 - DNA, 21 bp, Homo sapiens
agacagctcagccctcatgtc

SEQ ID NO: 186 - DNA, 20 bp, Homo sapiens
tcatcgcatccaccaccagc

SEQ ID NO: 187 - DNA, 34 bp, Homo sapiens
gggaaatatctgctatagtcatgatcaagaccac

SEQ ID NO: 188 - DNA, 29 bp, Homo sapiens
tcccaccgactaaataccttactgatgac

SEQ ID NO: 189 - DNA, 21 bp, Homo sapiens
tgtaccaacccatggatcagc

SEQ ID NO: 190 - DNA, 26 bp, Homo sapiens
gtaagcctgatatatgaggtgctgtg

SEQ ID NO: 191 - DNA, 27 bp, Homo sapiens
ctgtgtcattccaccatggatttaagc

SEQ ID NO: 192 - DNA, 18 bp, Homo sapiens
ggcgtgagccaaaatgcc

SEQ ID NO: 193 - DNA, 25 bp, Homo sapiens
gagatctgtgcctgatacgtgtctg

SEQ ID NO: 194 - DNA, 21 bp, Homo sapiens
tggactggtagggagatcgag

SEQ ID NO: 195 - DNA, 22 bp, Homo sapiens
ccctacatggggcatctcaaag

SEQ ID NO: 196 - DNA, 30 bp, Homo sapiens
gattcaagacttcaactttcactctggtcc

SEQ ID NO: 197 - DNA, 28 bp, Homo sapiens
tgtctgatagaagttgcagctagaactg

SEQ ID NO: 198 - DNA, 18 bp, Homo sapiens
gcagggaggctgtgtgtc

SEQ ID NO: 199 - DNA, 25 bp, Homo sapiens
cattcacacaaagacatacccggtg

SEQ ID NO: 200 - DNA, 26 bp, Homo sapiens
agcatatcaagatccaaccatggtgt

SEQ ID NO: 201 - DNA, 27 bp, Homo sapiens
tgcattctacacagagcacttaagttc

SEQ ID NO: 202 - DNA, 24 bp, Homo sapiens
actacttgttctggtgcctcagat

SEQ ID NO: 203 - DNA, 21 bp, Homo sapiens
ggaaatgcctttaggtgctcc

SEQ ID NO: 204 - DNA, 27 bp, Homo sapiens
accattaccaagaatggtagtccactg

SEQ ID NO: 205 - DNA, 25 bp, Homo sapiens
aggaagcacagatttctgaagcctg

SEQ ID NO: 206 - DNA, 28 bp, Homo sapiens
ttgctgaactttgagtatgtgcattcag

SEQ ID NO: 207 - DNA, 32 bp, Homo sapiens
agggctatcttgtattatgctgtaacacagtg

SEQ ID NO: 208 - DNA, 22 bp, Homo sapiens
gctggcattgtatctgctttgc

SEQ ID NO: 209 - DNA, 25 bp, Homo sapiens
acaatggcagaaacatggtaaggac

SEQ ID NO: 210 - DNA, 27 bp, Homo sapiens
tcacacaatcacattgcctgtactaag

SEQ ID NO: 211 - DNA, 30 bp, Homo sapiens
cctcgaataagtaaagcatctccgttagtg

SEQ ID NO: 212 - DNA, 29 bp, Homo sapiens
gctctgacaatctatggttccaaagttac

SEQ ID NO: 213 - DNA, 20 bp, Homo sapiens
tagctccatcctgcgaaagg

SEQ ID NO: 214 - DNA, 35 bp, Homo sapiens
cattcaaattgattaggtgtacacagtacatcatg

SEQ ID NO: 215 - DNA, 22 bp, Homo sapiens
tcagccacatctagagagtggg

SEQ ID NO: 216 - DNA, 29 bp, Homo sapiens
cgcttgaaaagcatattactcagaacagg

SEQ ID NO: 217 - DNA, 24 bp, Homo sapiens
accactggagagcaaaattaccca

SEQ ID NO: 218 - DNA, 22 bp, Homo sapiens
acaggacagaaggacagatggg

SEQ ID NO: 219 - DNA, 28 bp, Homo sapiens
ggccacatctcttataatgaggtatgac

SEQ ID NO: 220 - DNA, 28 bp, Homo sapiens
gctaacccaaaatatctgtgtaccaagt

SEQ ID NO: 221 - DNA, 27 bp, Homo sapiens
acagagagctaatgtatgcctaaggga

SEQ ID NO: 222 - DNA, 25 bp, Homo sapiens
aaagaaacgaaaactgctgaacacc

SEQ ID NO: 223 - DNA, 35 bp, Homo sapiens
ccatcagatagtatcaccttaatcttcctttggtc

SEQ ID NO: 224 - DNA, 23 bp, Homo sapiens
atgggtggtgtcttgtaggttgg

SEQ ID NO: 225 - DNA, 29 bp, Homo sapiens
gttctttctacaaaacagcaaccagagac

SEQ ID NO: 226 - DNA, 33 bp, Homo sapiens
gattggaatacaattgtgattctcctgtgaaac

SEQ ID NO: 227 - DNA, 21 bp, Homo sapiens
gatcgtcttgcctccgtgatg

SEQ ID NO: 228 - DNA, 32 bp, Homo sapiens
caagtctatcactggagcaatatatggagctg

SEQ ID NO: 229 - DNA, 27 bp, Homo sapiens
gaagctccagatataccatttaccagc

SEQ ID NO: 230 - DNA, 28 bp, Homo sapiens
ctcagataatttgggatctaccacacag

SEQ ID NO: 231 - DNA, 25 bp, Homo sapiens
tgtcacatggaagttctcccaaaag

SEQ ID NO: 232 - DNA, 25 bp, Homo sapiens
agagtatgttcaccaccaaaccaac

SEQ ID NO: 233 - DNA, 30 bp, Homo sapiens
gcacaatgacgttgctacaatttgttaacc

SEQ ID NO: 234 - DNA, 25 bp, Homo sapiens
aaatctcctgtgtaaagcacctcag

SEQ ID NO: 235 - DNA, 19 bp, Homo sapiens
gccaactcctggcttagca

SEQ ID NO: 236 - DNA, 22 bp, Homo sapiens
acccattctcttcaccccaaag

SEQ ID NO: 237 - DNA, 23 bp, Homo sapiens
accactccagtgggttagcattg

SEQ ID NO: 238 - DNA, 17 bp, Homo sapiens
ctgccctgccctgtacc

SEQ ID NO: 239 - DNA, 21 bp, Homo sapiens
accaaactcatagccatgcca

SEQ ID NO: 240 - DNA, 17 bp, Homo sapiens
cttccccccatcagggt

SEQ ID NO: 241 - DNA, 32 bp, Homo sapiens
gcttacccaaaacatttaaaagtcggtaaacc

SEQ ID NO: 242 - DNA, 31 bp, Homo sapiens
ggacacagcagattaatcagtcaacagatcc

SEQ ID NO: 243 - DNA, 27 bp, Homo sapiens
accattctcctacttttgtcatcatgg

SEQ ID NO: 244 - DNA, 24 bp, Homo sapiens
acatacccagttttacagagcctc

SEQ ID NO: 245 - DNA, 28 bp, Homo sapiens
ctgtgttatgtctgggtagacatttctc

SEQ ID NO: 246 - DNA, 25 bp, Homo sapiens
acatcacctttgaaactcttctggc

SEQ ID NO: 247 - DNA, 20 bp, Homo sapiens
aggcctgccttagttcagag

SEQ ID NO: 248 - DNA, 25 bp, Homo sapiens
ctctggaagatgagatgttgggtga

SEQ ID NO: 249 - DNA, 31 bp, Homo sapiens
gtaggttagagtagctggtgtttatgtctgc

SEQ ID NO: 250 - DNA, 32 bp, Homo sapiens
agaatctacaatagctccctattactcacaga

SEQ ID NO: 251 - DNA, 24 bp, Homo sapiens
cagagttgggttttagcccagcta

SEQ ID NO: 252 - DNA, 29 bp, Homo sapiens
ctggtctatagacagtttatctaagggct

SEQ ID NO: 253 - DNA, 26 bp, Homo sapiens
gagatttcatctcaggcatttagggt

SEQ ID NO: 254 - DNA, 29 bp, Homo sapiens
aggcaacttatgaacattatgtgtctgac

SEQ ID NO: 255 - DNA, 30 bp, Homo sapiens
aagcagtctatttgggtttcaatagttctg

SEQ ID NO: 256 - DNA, 33 bp, Homo sapiens
ccatgtatagcctcaaaaagaaatagcgtatgc

SEQ ID NO: 257 - DNA, 27 bp, Homo sapiens
aactcatgacaccttttaatcccagac

SEQ ID NO: 258 - DNA, 33 bp, Homo sapiens
actaaagatctatttcatgacttcaaacacagc

SEQ ID NO: 259 - DNA, 34 bp, Homo sapiens
gtgatttcatcaagaaagatgttttcagatgcgt

SEQ ID NO: 260 - DNA, 29 bp, Homo sapiens
tccaaaacgtcaaaatctaacctgtaacc

SEQ ID NO: 261 - DNA, 29 bp, Homo sapiens
ggttacaggttagattttgacgttttgga

SEQ ID NO: 262 - DNA, 29 bp, Homo sapiens
cttccctaactcaaatgccataagtcatc

SEQ ID NO: 263 - DNA, 38 bp, Homo sapiens
ggaaatgttgtttaggaggttcagattaattaattagc

SEQ ID NO: 264 - DNA, 37 bp, Homo sapiens
ctttaacctataactaaagctgtaaaactaaagctgc

SEQ ID NO: 265 - DNA, 27 bp, Homo sapiens
gttaacacagaacacactcactgatcc

SEQ ID NO: 266 - DNA, 27 bp, Homo sapiens
catctttgaagatccaccaagatgacc

SEQ ID NO: 267 - DNA, 23 bp, Homo sapiens
agattgattttgctgggggttcc

SEQ ID NO: 268 - DNA, 28 bp, Homo sapiens
acctccaaagctggtatcatgcttagag

SEQ ID NO: 269 - DNA, 31 bp, Homo sapiens
tttttgaaaccaatgcttaaatacttggtgg

SEQ ID NO: 270 - DNA, 32 bp, Homo sapiens
agtgctacagtcttaatcaaacacacagtttc

SEQ ID NO: 271 - DNA, 32 bp, Homo sapiens
catgtaaacttctggagtggtatttgtatgag

SEQ ID NO: 272 - DNA, 35 bp, Homo sapiens
tgtgtttgctaaataaacatataatcaccctttcc

SEQ ID NO: 273 - DNA, 29 bp, Homo sapiens
caacagatgaacagtgtcactgaagatcc

SEQ ID NO: 274 - DNA, 32 bp, Homo sapiens
tggttcagaacactaaatgtaccatgtatctg

SEQ ID NO: 275 - DNA, 41 bp, Homo sapiens
ttctctaacaagaaaggaatgtaagtttactctagcatatg

SEQ ID NO: 276 - DNA, 27 bp, Homo sapiens
taggtatcgtcggcttacagttcaaac

SEQ ID NO: 277 - DNA, 28 bp, Homo sapiens
gatagggcttatccagtttttctgggtg

SEQ ID NO: 278 - DNA, 25 bp, Homo sapiens
agggtttaaccttccaggttaagac

SEQ ID NO: 279 - DNA, 26 bp, Homo sapiens
aggcattatatacctggtacctcctc

SEQ ID NO: 280 - DNA, 25 bp, Homo sapiens
gctgtgtagttcaccattgacttgg

SEQ ID NO: 281 - DNA, 22 bp, Homo sapiens
gtgctagcactgtgtctactgg

SEQ ID NO: 282 - DNA, 29 bp, Homo sapiens
aggcttatacagttcattggatggtgtcc

SEQ ID NO: 283 - DNA, 28 bp, Homo sapiens
tcatttagtagtgaatcctgggtggtaa

SEQ ID NO: 284 - DNA, 24 bp, Homo sapiens
tcagcagtatttcttgccctttcg

SEQ ID NO: 285 - DNA, 29 bp, Homo sapiens
agggaaagtataggaagtatgttacgagg

SEQ ID NO: 286 - DNA, 24 bp, Homo sapiens
catcataggcaaccaatcacaagc

SEQ ID NO: 287 - DNA, 24 bp, Homo sapiens
ctcaaagtgttacatctgctggga

SEQ ID NO: 288 - DNA, 37 bp, Homo sapiens
gtcattgtcaatatgtctataaactttctgtcatgag

SEQ ID NO: 289 - DNA, 25 bp, Homo sapiens
tccatctttgtcattgtctacccac

SEQ ID NO: 290 - DNA, 26 bp, Homo sapiens
aggaagaaaagctaaccacaacttcc

SEQ ID NO: 291 - DNA, 27 bp, Homo sapiens
catcgtctgatatcaagttctgctagg

SEQ ID NO: 292 - DNA, 18 bp, Homo sapiens
acaggggagaaggctgtg

SEQ ID NO: 293 - DNA, 26 bp, Homo sapiens
aggagatatggatgtaaacaaggcca

SEQ ID NO: 294 - DNA, 28 bp, Homo sapiens
ttgtattcagtcaagacactctctgacc

SEQ ID NO: 295 - DNA, 28 bp, Homo sapiens
tgagtcaactgaaggtacagtgtctatc

SEQ ID NO: 296 - DNA, 33 bp, Homo sapiens
tgactttgtttcatagataaaactgatgtgcca

SEQ ID NO: 297 - DNA, 31 bp, Homo sapiens
gcatattacttaggagtgcttgatacttcag

SEQ ID NO: 298 - DNA, 26 bp, Homo sapiens
acctagtacactcttttgaagcctca

SEQ ID NO: 299 - DNA, 28 bp, Homo sapiens
acaaggtctcacatcaggaattttcaaa

SEQ ID NO: 300 - DNA, 27 bp, Homo sapiens
agttagagccgaagaactgagatctgc

SEQ ID NO: 301 - DNA, 27 bp, Homo sapiens
gcagatctcagttcttcggctctaact

SEQ ID NO: 302 - DNA, 22 bp, Homo sapiens
ggccttagaatgattgcctcct

SEQ ID NO: 303 - DNA, 24 bp, Homo sapiens
agatcttcagccaaccagaagagg

SEQ ID NO: 304 - DNA, 32 bp, Homo sapiens
gcctgtgaataagtttcaaatattggattccc

SEQ ID NO: 305 - DNA, 28 bp, Homo sapiens
acacttgtcaagtattttcagctcagtg

SEQ ID NO: 306 - DNA, 27 bp, Homo sapiens
ggattttggccttcagtattaacaacg

SEQ ID NO: 307 - DNA, 30 bp, Homo sapiens
tgactaatggtttgaatactactgtcaggt

SEQ ID NO: 308 - DNA, 34 bp, Homo sapiens
agatcacagttacagctagagtaagaaacgtgtc

SEQ ID NO: 309 - DNA, 23 bp, Homo sapiens
tggggactaggaggagatgatgg

SEQ ID NO: 310 - DNA, 27 bp, Homo sapiens
cgctcagaaaaggtacctgtttatcac

SEQ ID NO: 311 - DNA, 27 bp, Homo sapiens
gtgataaacaggtaccttttctgagcg

SEQ ID NO: 312 - DNA, 39 bp, Homo sapiens
ctctagtatccatacttaaaccatctttgtaagtatctg

SEQ ID NO: 313 - DNA, 31 bp, Homo sapiens
acgccattggcaatacttcataatgtaatgg

SEQ ID NO: 314 - DNA, 23 bp, Homo sapiens
ggtttgtcgtgacatgtgactgt

SEQ ID NO: 315 - DNA, 23 bp, Homo sapiens
acagtcacatgtcacgacaaacc

SEQ ID NO: 316 - DNA, 21 bp, Homo sapiens
aagggccacttcatgttcaca

SEQ ID NO: 317 - DNA, 27 bp, Homo sapiens
agggtttaggctcataattgctaatgc

SEQ ID NO: 318 - DNA, 32 bp, Homo sapiens
acgttgtcaaaaggaattaaatgtggttatgc

SEQ ID NO: 319 - DNA, 20 bp, Homo sapiens
gctccctgggttataccgag

SEQ ID NO: 320 - DNA, 28 bp, Homo sapiens
tttgagtaaagacagatctttgctggag

SEQ ID NO: 321 - DNA, 19 bp, Homo sapiens
agcagaaccccagaagtcc

SEQ ID NO: 322 - DNA, 21 bp, Homo sapiens
tgcattggtgacagtgtgtgg

SEQ ID NO: 323 - DNA, 24 bp, Homo sapiens
cccctgtagatagtagctgcttga

SEQ ID NO: 324 - DNA, 27 bp, Homo sapiens
cattctgcgtaaacacacatcctagag

SEQ ID NO: 325 - DNA, 21 bp, Homo sapiens
gcctgggaatttgcattccag

SEQ ID NO: 326 - DNA, 21 bp, Homo sapiens
tctgcctcagaagctcattcc

SEQ ID NO: 327 - DNA, 27 bp, Homo sapiens
tgaatatttcttgtgtccctggattgg

SEQ ID NO: 328 - DNA, 22 bp, Homo sapiens
tcctctccattctggtgaccct

SEQ ID NO: 329 - DNA, 23 bp, Homo sapiens
tcccaggcaaaataccctatgac

SEQ ID NO: 330 - DNA, 19 bp, Homo sapiens
ccagaagaccccatgggtc

SEQ ID NO: 331 - DNA, 19 bp, Homo sapiens
ctgaacagactggccctgg

SEQ ID NO: 332 - DNA, 19 bp, Homo sapiens
tgggcttggtgaaacccag

SEQ ID NO: 333 - DNA, 26 bp, Homo sapiens
gaagaagtccataggcttcttctgac

SEQ ID NO: 334 - DNA, 22 bp, Homo sapiens
tagacacacctgaaaggaccgt

SEQ ID NO: 335 - DNA, 21 bp, Homo sapiens
agggttggtggagtgatgagg

SEQ ID NO: 336 - DNA, 20 bp, Homo sapiens
cccaagactccacacaaagc

SEQ ID NO: 337 - DNA, 23 bp, Homo sapiens
tgaaaactctcaaggctgcttcc

SEQ ID NO: 338 - DNA, 22 bp, Homo sapiens
ggccagaggattccatctaagc

SEQ ID NO: 339 - DNA, 28 bp, Homo sapiens
tggaatatcggttaatgaattggacctc

SEQ ID NO: 340 - DNA, 21 bp, Homo sapiens
gtaagggcaggacatctggac

SEQ ID NO: 341 - DNA, 19 bp, Homo sapiens
accctagtgaaccctgggc

SEQ ID NO: 342 - DNA, 23 bp, Homo sapiens
ggagatgagtcctgagagacagg

SEQ ID NO: 343 - DNA, 19 bp, Homo sapiens
tctgggagctgacttggca

SEQ ID NO: 344 - DNA, 18 bp, Homo sapiens
tgggaggttgggtaggga

SEQ ID NO: 345 - DNA, 19 bp, Homo sapiens
ctgtcgcataccagggtgg

SEQ ID NO: 346 - DNA, 18 bp, Homo sapiens
ccgtccctctgggtagtc

SEQ ID NO: 347 - DNA, 23 bp, Homo sapiens
cttgtgtaaagcaaggcttccag

SEQ ID NO: 348 - DNA, 28 bp, Homo sapiens
ctagtgtgacttcacagataaccaagct

SEQ ID NO: 349 - DNA, 20 bp, Homo sapiens
tgtggtggccttgctatcag

SEQ ID NO: 350 - DNA, 27 bp, Homo sapiens
cctttacatgggcaaagaaagcttttc

SEQ ID NO: 351 - DNA, 30 bp, Homo sapiens
catcaacaaagcatctgtcattagcagtgt

SEQ ID NO: 352 - DNA, 27 bp, Homo sapiens
caaaggaagcctatttggacttcatgg

SEQ ID NO: 353 - DNA, 26 bp, Homo sapiens
cagtgagctctaatggcaaagattcc

SEQ ID NO: 354 - DNA, 25 bp, Homo sapiens
cagtaccacaggctgataatctggt

SEQ ID NO: 355 - DNA, 19 bp, Homo sapiens
tggtgcatccatgctctgc

SEQ ID NO: 356 - DNA, 24 bp, Homo sapiens
actcaactcgttcatcaacacctc

SEQ ID NO: 357 - DNA, 27 bp, Homo sapiens
gagagaaagacccaatatgttcaggtg

SEQ ID NO: 358 - DNA, 30 bp, Homo sapiens
attcaagttcagacctcaaatctgatcacg

SEQ ID NO: 359 - DNA, 25 bp, Homo sapiens
cattcatgccacttctacttgcagg

SEQ ID NO: 360 - DNA, 22 bp, Homo sapiens
tgaatcgagggatgttggaagc

SEQ ID NO: 361 - DNA, 20 bp, Homo sapiens
gtcctttcccaccaagcctg

SEQ ID NO: 362 - DNA, 21 bp, Homo sapiens
acactgaacctactcggcaac

SEQ ID NO: 363 - DNA, 27 bp, Homo sapiens
ctgggaaactcttggagatcagatgtg

SEQ ID NO: 364 - DNA, 20 bp, Homo sapiens
ggagtcgcaaagcagtgtgg

SEQ ID NO: 365 - DNA, 19 bp, Homo sapiens
tgtggcagaaggtggaagg

SEQ ID NO: 366 - DNA, 21 bp, Homo sapiens
ccactgaagagaccaaggagg

SEQ ID NO: 367 - DNA, 19 bp, Homo sapiens
gggtgcatggcattgtacg

SEQ ID NO: 368 - DNA, 20 bp, Homo sapiens
gagagggctctgtgtgatcg

SEQ ID NO: 369 - DNA, 26 bp, Homo sapiens
acaagttgctagctttcctcattagg

SEQ ID NO: 370 - DNA, 19 bp, Homo sapiens
ggaagatgctcccacaggc

SEQ ID NO: 371 - DNA, 24 bp, Homo sapiens
accatgcttatacatgggtcatgc

SEQ ID NO: 372 - DNA, 20 bp, Homo sapiens
tcactctgaggggacttggc

SEQ ID NO: 373 - DNA, 20 bp, Homo sapiens
tgagagaggtctgggagcag

SEQ ID NO: 374 - DNA, 31 bp, Homo sapiens
gcattagatagcatatagtttccagtttggg

SEQ ID NO: 375 - DNA, 33 bp, Homo sapiens
agggcagtaacttagacatctaattcttcttgg

SEQ ID NO: 376 - DNA, 29 bp, Homo sapiens
gtgagcatctaacacaaaggagttcagtc

SEQ ID NO: 377 - DNA, 26 bp, Homo sapiens
tcaagaatttcctttaggcagcaagg

SEQ ID NO: 378 - DNA, 23 bp, Homo sapiens
gcacaccgttttacctggaagac

SEQ ID NO: 379 - DNA, 29 bp, Homo sapiens
ggagacaaatagttctctatcgcatgttg

SEQ ID NO: 380 - DNA, 21 bp, Homo sapiens
ccttccaagggtgtgtttcac

SEQ ID NO: 381 - DNA, 25 bp, Homo sapiens
cgtagagttcatgtacatcagttgt

SEQ ID NO: 382 - DNA, 24 bp, Homo sapiens
tggtatactaaccagcaggacttt

SEQ ID NO: 383 - DNA, 24 bp, Homo sapiens
cactgcgattctacttcgcaatga

SEQ ID NO: 384 - DNA, 24 bp, Homo sapiens
gaacaggatgtcttccttttgctc

SEQ ID NO: 385 - DNA, 25 bp, Homo sapiens
ctgtggagttattgctaggaatggt

SEQ ID NO: 386 - DNA, 22 bp, Homo sapiens
tagctggtagagcaagacctgt

SEQ ID NO: 387 - DNA, 24 bp, Homo sapiens
ctcaagttggaacacaatggttgc

SEQ ID NO: 388 - DNA, 18 bp, Homo sapiens
ccggcagagctggcaact

SEQ ID NO: 389 - DNA, 20 bp, Homo sapiens
ccatcatccccaaagctcct

SEQ ID NO: 390 - DNA, 21 bp, Homo sapiens
tggagacctttgctgtcacaa

SEQ ID NO: 391 - DNA, 23 bp, Homo sapiens
agagctctaagtactggcaaggt

SEQ ID NO: 392 - DNA, 25 bp, Homo sapiens
ccaacacaacacaaaccatctatga

SEQ ID NO: 393 - DNA, 25 bp, Homo sapiens
gcaagtcttctatgtaaccttccag

SEQ ID NO: 394 - DNA, 27 bp, Homo sapiens
acattgattgtaatcagcaacgttgat

SEQ ID NO: 395 - DNA, 26 bp, Homo sapiens
tacaggatggattggaagttaagtcc

SEQ ID NO: 396 - DNA, 18 bp, Homo sapiens
ggagatgcatgaggcctg

SEQ ID NO: 397 - DNA, 19 bp, Homo sapiens
gctgacttcaggagcggct

SEQ ID NO: 398 - DNA, 21 bp, Homo sapiens
gtctgccaatgattgccagct

SEQ ID NO: 399 - DNA, 25 bp, Homo sapiens
gcaaagaaggaatagggtgatctct

SEQ ID NO: 400 - DNA, 29 bp, Homo sapiens
agctaatacatgtcagtcctgaaatatgc

SEQ ID NO: 401 - DNA, 20 bp, Homo sapiens
gctctgaacagaaggcgagt

SEQ ID NO: 402 - DNA, 21 bp, Homo sapiens
gcaaagccctagctttacctc

SEQ ID NO: 403 - DNA, 27 bp, Homo sapiens
cattaaagaatcttccagcatcccaca

SEQ ID NO: 404 - DNA, 22 bp, Homo sapiens
tggggaagacaatgtctgttca

SEQ ID NO: 405 - DNA, 28 bp, Homo sapiens
cctgtgtacaaattcaagactttgagct

SEQ ID NO: 406 - DNA, 23 bp, Homo sapiens
tgtgtgggatgtggttgaaatca

SEQ ID NO: 407 - DNA, 24 bp, Homo sapiens
tgtaggccctgtgaaattctgatc

SEQ ID NO: 408 - DNA, 21 bp, Homo sapiens
gctgctcatacagagacccat

SEQ ID NO: 409 - DNA, 25 bp, Homo sapiens
gtgaaaccgtatcttggtcatgtct

SEQ ID NO: 410 - DNA, 25 bp, Homo sapiens
tccaattggccaacagttaagtggt

SEQ ID NO: 411 - DNA, 22 bp, Homo sapiens
ctattcccaaatgcgtgatgct

SEQ ID NO: 412 - DNA, 21 bp, Homo sapiens
tgcgtccgcttatgataacca

SEQ ID NO: 413 - DNA, 26 bp, Homo sapiens
cagtatctctctgattcttgaagcct

SEQ ID NO: 414 - DNA, 28 bp, Homo sapiens
gaatagcttgaatctgctttacacaaca

SEQ ID NO: 415 - DNA, 26 bp, Homo sapiens
caaagcagaaccacccataatttggt

SEQ ID NO: 416 - DNA, 23 bp, Homo sapiens
accctgagcctacttgattgtgt

SEQ ID NO: 417 - DNA, 27 bp, Homo sapiens
ggtgcagtacaaatttagctggtagtt

SEQ ID NO: 418 - DNA, 21 bp, Homo sapiens
catgatgaagcggtcaggcgt

SEQ ID NO: 419 - DNA, 26 bp, Homo sapiens
caatgactccctttgctattactcct

SEQ ID NO: 420 - DNA, 23 bp, Homo sapiens
tcttaccctccaccatgttccaa

SEQ ID NO: 421 - DNA, 26 bp, Homo sapiens
tgtcaacatctatgctgagtgtgtag

SEQ ID NO: 422 - DNA, 24 bp, Homo sapiens
tctcagctgggctatgttaaagta

SEQ ID NO: 423 - DNA, 25 bp, Homo sapiens
agaaggcaaattacccagttcagtt

SEQ ID NO: 424 - DNA, 25 bp, Homo sapiens
gagaaacaacgtagctggatcagaa

SEQ ID NO: 425 - DNA, 19 bp, Homo sapiens
atccagaggaccgctaccg

SEQ ID NO: 426 - DNA, 25 bp, Homo sapiens
cttggtgctcaaagaacctaaatgg

SEQ ID NO: 427 - DNA, 24 bp, Homo sapiens
aggaattcctcaacgtttgtagca

SEQ ID NO: 428 - DNA, 21 bp, Homo sapiens
ccacagaggattccttccggt

SEQ ID NO: 429 - DNA, 18 bp, Homo sapiens
ggacagcccctgtgggat

SEQ ID NO: 430 - DNA, 26 bp, Homo sapiens
ggttctaatggtaatttgcctcagtc

SEQ ID NO: 431 - DNA, 23 bp, Homo sapiens
tgcatgtctgtgcttcatatgca

SEQ ID NO: 432 - DNA, 24 bp, Homo sapiens
accaagaccaaaacagccatttca

SEQ ID NO: 433 - DNA, 24 bp, Homo sapiens
aggtgtggcttactgtgataaaca

SEQ ID NO: 434 - DNA, 25 bp, Homo sapiens
catatggctttataggctgacatgt

SEQ ID NO: 435 - DNA, 19 bp, Homo sapiens
ccagcatagctcatccctc

SEQ ID NO: 436 - DNA, 26 bp, Homo sapiens
gatttgtaaggtgacaacttgtgtca

SEQ ID NO: 437 - DNA, 23 bp, Homo sapiens
ctctaccatctctgcattcccaa

SEQ ID NO: 438 - DNA, 31 bp, Homo sapiens
gcagctgattaaaggattatactttgattcc

SEQ ID NO: 439 - DNA, 23 bp, Homo sapiens
tggagtaaacagagagggatggt

SEQ ID NO: 440 - DNA, 20 bp, Homo sapiens
ggtctgttccatggaggtca

SEQ ID NO: 441 - DNA, 23 bp, Homo sapiens
tgggtgacactgtactttgatca

SEQ ID NO: 442 - DNA, 22 bp, Homo sapiens
ggcatactctctttcaagccaa

SEQ ID NO: 443 - DNA, 25 bp, Homo sapiens
acagtaagtaacagccacagttagg

SEQ ID NO: 444 - DNA, 20 bp, Homo sapiens
gccgacttgacaagaaggca

SEQ ID NO: 445 - DNA, 30 bp, Homo sapiens
cttaattcccaaagaagactacagaaagct

SEQ ID NO: 446 - DNA, 18 bp, Homo sapiens
gaaaggaggtggaggtgg

SEQ ID NO: 447 - DNA, 24 bp, Homo sapiens
tgggaatcactgtgaagttctgta

SEQ ID NO: 448 - DNA, 23 bp, Homo sapiens
cctatatgaagtgctagcccagt

SEQ ID NO: 449 - DNA, 28 bp, Homo sapiens
ctcattaacaatccatagttcaaggcat

SEQ ID NO: 450 - DNA, 25 bp, Homo sapiens
catgcttaacataaccaccaaccaa

SEQ ID NO: 451 - DNA, 17 bp, Homo sapiens
agagggtggaggaggga

SEQ ID NO: 452 - DNA, 18 bp, Homo sapiens
tcacttcagtccaggctg

SEQ ID NO: 453 - DNA, 21 bp, Homo sapiens
aggaagttaggaaatgcgcct

SEQ ID NO: 454 - DNA, 38 bp, Homo sapiens
gtgtgtattgcatataacataatctatagtgtatgctg

SEQ ID NO: 455 - DNA, 25 bp, Homo sapiens
cactactgagtaccttgattctggt

SEQ ID NO: 456 - DNA, 19 bp, Homo sapiens
ccagtgcagagaaaccagc

SEQ ID NO: 457 - DNA, 26 bp, Homo sapiens
cagcgattaagtgccttacttgttgt

SEQ ID NO: 458 - DNA, 22 bp, Homo sapiens
ccgtctctggactgattccact

SEQ ID NO: 459 - DNA, 18 bp, Homo sapiens
tgcgggaaatggtcagct

SEQ ID NO: 460 - DNA, 26 bp, Homo sapiens
cagcaatcagaagacaagatcttggt

SEQ ID NO: 461 - DNA, 20 bp, Homo sapiens
tggcccatctgatgtcacgt

SEQ ID NO: 462 - DNA, 25 bp, Homo sapiens
tggcacaacaggaataggggttaca

SEQ ID NO: 463 - DNA, 25 bp, Homo sapiens
tcacttaatccagcagtttgggaac

SEQ ID NO: 464 - DNA, 24 bp, Homo sapiens
acatccggcatttgatttgaagag

SEQ ID NO: 465 - DNA, 22 bp, Homo sapiens
gccaatatggtgatgcctgtct

SEQ ID NO: 466 - DNA, 24 bp, Homo sapiens
agcaggtttctctcattctggtct

SEQ ID NO: 467 - DNA, 22 bp, Homo sapiens
gcatgcacctagaagcaacttc

SEQ ID NO: 468 - DNA, 22 bp, Homo sapiens
gcaggcatctagggaaattagg

SEQ ID NO: 469 - DNA, 24 bp, Homo sapiens
cctcacctctgatgcatacttgct

SEQ ID NO: 470 - DNA, 23 bp, Homo sapiens
tgacaaccaggtgacatacacat

SEQ ID NO: 471 - DNA, 19 bp, Homo sapiens
aggctctgcttcgcttctg

SEQ ID NO: 472 - DNA, 25 bp, Homo sapiens
gctatacccattaagagagcagagg

SEQ ID NO: 473 - DNA, 23 bp, Homo sapiens
actcctaagcactgatttgggat

SEQ ID NO: 474 - DNA, 21 bp, Homo sapiens
ggtcaccaactctctgcaact

SEQ ID NO: 475 - DNA, 22 bp, Homo sapiens
acaattgcctcaacacgaagga

SEQ ID NO: 476 - DNA, 24 bp, Homo sapiens
catgcaacttattccctaaggctc

SEQ ID NO: 477 - DNA, 18 bp, Homo sapiens
cagaggccaaggccagga

SEQ ID NO: 478 - DNA, 24 bp, Homo sapiens
gtcacggctacattaacgtctgga

SEQ ID NO: 479 - DNA, 25 bp, Homo sapiens
ggagaactaattcttcttgggcagc

SEQ ID NO: 480 - DNA, 22 bp, Homo sapiens
gtgggacagagattgcaatgga

SEQ ID NO: 481 - DNA, 26 bp, Homo sapiens
aacattgtatacgttgaagggctttt

SEQ ID NO: 482 - DNA, 26 bp, Homo sapiens
cagcgtaagctgttgaggaattcact

SEQ ID NO: 483 - DNA, 18 bp, Homo sapiens
gaggctaggccctggtaa

SEQ ID NO: 484 - DNA, 22 bp, Homo sapiens
gactgtgtgactaccatcagga

SEQ ID NO: 485 - DNA, 25 bp, Homo sapiens
ggcataagggaaagtctttccaaat

SEQ ID NO: 486 - DNA, 28 bp, Homo sapiens
cagattggtccaaatgctaatacatgtg

SEQ ID NO: 487 - DNA, 30 bp, Homo sapiens
tcactgactcttcagtatgttataacctga

SEQ ID NO: 488 - DNA, 22 bp, Homo sapiens
ggtatcaagcacgactggttgc

SEQ ID NO: 489 - DNA, 22 bp, Homo sapiens
ggcaaaggttaacgtaggtgag

SEQ ID NO: 490 - DNA, 24 bp, Homo sapiens
cagagctcaatgtaaaagcactgc

SEQ ID NO: 491 - DNA, 25 bp, Homo sapiens
agataggagtacctcctttacacca

SEQ ID NO: 492 - DNA, 17 bp, Homo sapiens
ccacgctcccagcagca

SEQ ID NO: 493 - DNA, 16 bp, Homo sapiens
ggaaggcccgatggca

SEQ ID NO: 494 - DNA, 25 bp, Homo sapiens
agtgcagatctccttatggtcaaga

SEQ ID NO: 495 - DNA, 21 bp, Homo sapiens
acccacttcttgccaaaatgc

SEQ ID NO: 496 - DNA, 21 bp, Homo sapiens
acacaggcttaggcacatctg

SEQ ID NO: 497 - DNA, 23 bp, Homo sapiens
tgctgtgaatggaatagagccac

SEQ ID NO: 498 - DNA, 38 bp, Homo sapiens
gctagcatctactatttccctacatctataattacatg

SEQ ID NO: 499 - DNA, 18 bp, Homo sapiens
tcactgggcaaagctgct

SEQ ID NO: 500 - DNA, 29 bp, Homo sapiens
tgaagtctatgacaaagctttagttgtga

SEQ ID NO: 501 - DNA, 28 bp, Homo sapiens
gaatgggtaatgtttaaacatgtggagg

SEQ ID NO: 502 - DNA, 25 bp, Homo sapiens
gttgtgttaggatccttccattcac

SEQ ID NO: 503 - DNA, 24 bp, Homo sapiens
ccagtggaagatctagcataggag

SEQ ID NO: 504 - DNA, 20 bp, Homo sapiens
acctgttgcaagctgtactg

SEQ ID NO: 505 - DNA, 29 bp, Homo sapiens
gatggagctctatttgatgactaagaagg

SEQ ID NO: 506 - DNA, 24 bp, Homo sapiens
tgatcctcagcacctaatgtgttc

SEQ ID NO: 507 - DNA, 19 bp, Homo sapiens
ctcagcgaaagagctggtg

SEQ ID NO: 508 - DNA, 21 bp, Homo sapiens
ctggagagtcaccatgatcca

SEQ ID NO: 509 - DNA, 28 bp, Homo sapiens
gtggttaatgaatgcacaagttgtactt

SEQ ID NO: 510 - DNA, 26 bp, Homo sapiens
agatatctaatgcctagctcagggta

SEQ ID NO: 511 - DNA, 24 bp, Homo sapiens
cctcaatgcagatgagattgtcac

SEQ ID NO: 512 - DNA, 21 bp, Homo sapiens
tgcactgatgatggctttcct

SEQ ID NO: 513 - DNA, 21 bp, Homo sapiens
gacaaacatcagcaaacccca

SEQ ID NO: 514 - DNA, 23 bp, Homo sapiens
acccctgaaaaggaacactaagc

SEQ ID NO: 515 - DNA, 25 bp, Homo sapiens
ctactatccgagaaagtgggaactg

SEQ ID NO: 516 - DNA, 25 bp, Homo sapiens
agatgtaactgaatcccttgtgtga

SEQ ID NO: 517 - DNA, 25 bp, Homo sapiens
tggctcttaattttacaaggtctgc

SEQ ID NO: 518 - DNA, 21 bp, Homo sapiens
tgctcttgaagcaaaccaagt

SEQ ID NO: 519 - DNA, 30 bp, Homo sapiens
atgagtcactccaatgaagaactttaactg

SEQ ID NO: 520 - DNA, 30 bp, Homo sapiens
tcactgtcagttatcaagagactatcagtc

SEQ ID NO: 521 - DNA, 24 bp, Homo sapiens
gaatgggcaaatgcacaaagtatg

SEQ ID NO: 522 - DNA, 19 bp, Homo sapiens
agaggactccctgaggtga

SEQ ID NO: 523 - DNA, 17 bp, Homo sapiens
gtgctcaccgccttctc

SEQ ID NO: 524 - DNA, 20 bp, Homo sapiens
acgtagacaggaggagggat

SEQ ID NO: 525 - DNA, 18 bp, Homo sapiens
tgccctgtggacagctgc

SEQ ID NO: 526 - DNA, 17 bp, Homo sapiens
tggggcactgggcactg

SEQ ID NO: 527 - DNA, 25 bp, Homo sapiens
ccatttctgaccttcacagacatcc

SEQ ID NO: 528 - DNA, 22 bp, Homo sapiens
cctcactgcttaagcctaccac

SEQ ID NO: 529 - DNA, 16 bp, Homo sapiens
cggaattgcgggctgc

SEQ ID NO: 530 - DNA, 22 bp, Homo sapiens
cttggtaccattgggcctaacc

SEQ ID NO: 531 - DNA, 24 bp, Homo sapiens
actgcagaccacttctgaagttgg

SEQ ID NO: 532 - DNA, 19 bp, Homo sapiens
agctcccctaggcttgtcc

SEQ ID NO: 533 - DNA, 26 bp, Homo sapiens
tacagaaaagctccaacacatgctcc

SEQ ID NO: 534 - DNA, 22 bp, Homo sapiens
gttgatttccccctcagcatgg

SEQ ID NO: 535 - DNA, 21 bp, Homo sapiens
aatgccctgtcccaatgactg

SEQ ID NO: 536 - DNA, 27 bp, Homo sapiens
agttagactgccttgtaaggacgcttc

SEQ ID NO: 537 - DNA, 17 bp, Homo sapiens
cagggcaccctggatgg

SEQ ID NO: 538 - DNA, 28 bp, Homo sapiens
cgttagtcatctggtccctatcacaagc

SEQ ID NO: 539 - DNA, 29 bp, Homo sapiens
tggaatttactcttcacagcattcagggt

SEQ ID NO: 540 - DNA, 34 bp, Homo sapiens
tgagggtcaacatcttaagtctctgtctttgaag

SEQ ID NO: 541 - DNA, 26 bp, Homo sapiens
gagacaatccaggcatctctaagagc

SEQ ID NO: 542 - DNA, 21 bp, Homo sapiens
ggctgagctgagaggtatccc

SEQ ID NO: 543 - DNA, 21 bp, Homo sapiens
cctcctgcagacccaacagac

SEQ ID NO: 544 - DNA, 22 bp, Homo sapiens
tcatcttccctgtgcatgcgtg

SEQ ID NO: 545 - DNA, 23 bp, Homo sapiens
aggagggatgtgtcttaactgcc

SEQ ID NO: 546 - DNA, 22 bp, Homo sapiens
agaagtccctttgacctgccac

SEQ ID NO: 547 - DNA, 23 bp, Homo sapiens
tgagggagtggcatgatcaaagc

SEQ ID NO: 548 - DNA, 19 bp, Homo sapiens
agcacctggccaggaacag

SEQ ID NO: 549 - DNA, 22 bp, Homo sapiens
acaggcttggaaaagccaatgg

SEQ ID NO: 550 - DNA, 21 bp, Homo sapiens
aggagcctcttcacccttctc

SEQ ID NO: 551 - DNA, 35 bp, Homo sapiens
agagactggaatggatgatagaaagtagtgttctc

SEQ ID NO: 552 - DNA, 27 bp, Homo sapiens
tgctagtaaggctgttgaggacaaagg

SEQ ID NO: 553 - DNA, 32 bp, Homo sapiens
aagagtcttagtagctataacctgctacacac

SEQ ID NO: 554 - DNA, 29 bp, Homo sapiens
aagaccttattccccacttacctgttagg

SEQ ID NO: 555 - DNA, 33 bp, Homo sapiens
acctgcgttgtaattacatccaatgaatgaagg

SEQ ID NO: 556 - DNA, 30 bp, Homo sapiens
aggaataagcaaagccacagtttctgtctc

SEQ ID NO: 557 - DNA, 28 bp, Homo sapiens
tgtgagttaggagaggagagaggtttcc

SEQ ID NO: 558 - DNA, 23 bp, Homo sapiens
agcatcagcagatgggcttagtg

SEQ ID NO: 559 - DNA, 27 bp, Homo sapiens
actatgagccgtttcagcaaaactgag

SEQ ID NO: 560 - DNA, 29 bp, Homo sapiens
agaggttggtgaaagatgttcaaacccag

SEQ ID NO: 561 - DNA, 33 bp, Homo sapiens
agaatttctctaaggattttggtccgtggagtc

SEQ ID NO: 562 - DNA, 18 bp, Homo sapiens
agccctcctgcttcatgg

SEQ ID NO: 563 - DNA, 18 bp, Homo sapiens
acaaggcgaaaccgccgc

SEQ ID NO: 564 - DNA, 22 bp, Homo sapiens
acacacccagtaggcaatgctg

SEQ ID NO: 565 - DNA, 20 bp, Homo sapiens
ctccttgcctggagtggtgg

SEQ ID NO: 566 - DNA, 23 bp, Homo sapiens
tgacagctgtgctcctcctaacc

SEQ ID NO: 567 - DNA, 23 bp, Homo sapiens
acgaagtcagtttggtggtggtg

SEQ ID NO: 568 - DNA, 30 bp, Homo sapiens
tggagacaaaggacgatgtaaggaaccttc

SEQ ID NO: 569 - DNA, 34 bp, Homo sapiens
ggttacttgatcagactgagcttttccatggtaa

SEQ ID NO: 570 - DNA, 19 bp, Homo sapiens
ccccacagaccggtacagc

SEQ ID NO: 571 - DNA, 19 bp, Homo sapiens
tggcttcctccccaggcac

SEQ ID NO: 572 - DNA, 23 bp, Homo sapiens
cctaacccaccctcagtcctacc

SEQ ID NO: 573 - DNA, 28 bp, Homo sapiens
agcgaagagttaaaggcagttcagagag

SEQ ID NO: 574 - DNA, 26 bp, Homo sapiens
gcaaagggatgatggtagttgtggct

SEQ ID NO: 575 - DNA, 30 bp, Homo sapiens
aaggttgcttcacatctatttgtgggtgtc

SEQ ID NO: 576 - DNA, 26 bp, Homo sapiens
tcctcccttcctatcccttacagtgc

SEQ ID NO: 577 - DNA, 27 bp, Homo sapiens
tgaactggtctttgaaagatgggtagg

SEQ ID NO: 578 - DNA, 21 bp, Homo sapiens
tgtaagctgggtggtgacagg

SEQ ID NO: 579 - DNA, 17 bp, Homo sapiens
tgaggagggcggtgctg

SEQ ID NO: 580 - DNA, 29 bp, Homo sapiens
agtaatgtacaggctgaagagcatcatgc

SEQ ID NO: 581 - DNA, 22 bp, Homo sapiens
actctgacccctctcacgagca

SEQ ID NO: 582 - DNA, 27 bp, Homo sapiens
tacctagcctgtctacctcacaagacc

SEQ ID NO: 583 - DNA, 28 bp, Homo sapiens
tggcacacaaaatggcaatggcatagtc

SEQ ID NO: 584 - DNA, 24 bp, Homo sapiens
cagcacgcccatcttctaagtcag

SEQ ID NO: 585 - DNA, 21 bp, Homo sapiens
gctgggtgtgctggtgaactt

SEQ ID NO: 586 - DNA, 18 bp, Homo sapiens
ccgccctctgaatccctg

SEQ ID NO: 587 - DNA, 23 bp, Homo sapiens
agatggcgctggtatctagctcc

SEQ ID NO: 588 - DNA, 22 bp, Homo sapiens
ttgggagatgaaggtctgcagc

SEQ ID NO: 589 - DNA, 20 bp, Homo sapiens
aggttttggcctggccttgc

SEQ ID NO: 590 - DNA, 17 bp, Homo sapiens
tccaagctgaggccgga

SEQ ID NO: 591 - DNA, 26 bp, Homo sapiens
tctggggttctgttatccagtcagtc

SEQ ID NO: 592 - DNA, 22 bp, Homo sapiens
agccacgccaacaaggttcatc

SEQ ID NO: 593 - DNA, 26 bp, Homo sapiens
tgtccacttcaaggtgaatgaccagg

SEQ ID NO: 594 - DNA, 22 bp, Homo sapiens
acagcttgtaggtggcacactg

SEQ ID NO: 595 - DNA, 22 bp, Homo sapiens
agtgtgccacctacaagctgtg

SEQ ID NO: 596 - DNA, 29 bp, Homo sapiens
agacgaacttgagaactttcctcctcctc

SEQ ID NO: 597 - DNA, 21 bp, Homo sapiens
agcatctgcaccaggcttgtc

SEQ ID NO: 598 - DNA, 27 bp, Homo sapiens
tgtgagggaaatctaccttcgttcatg

SEQ ID NO: 599 - DNA, 35 bp, Homo sapiens
tgcatctagaaagttcctcagaggtaagactactc

SEQ ID NO: 600 - DNA, 24 bp, Homo sapiens
tccctttgtgctcttgatctcagg

SEQ ID NO: 601 - DNA, 27 bp, Homo sapiens
aggcttcagagaaaagttcaggctcag

SEQ ID NO: 602 - DNA, 31 bp, Homo sapiens
tgctcttgccaagtaagattctcttcagagc

SEQ ID NO: 603 - DNA, 27 bp, Homo sapiens
agagaatcttacttggcaagagcagtg

SEQ ID NO: 604 - DNA, 25 bp, Homo sapiens
acacttctatctgcccagctaccag

SEQ ID NO: 605 - DNA, 28 bp, Homo sapiens
acaacttattggttgggtgaatgaactc

SEQ ID NO: 606 - DNA, 17 bp, Homo sapiens
agtccctggtggccctg

SEQ ID NO: 607 - DNA, 17 bp, Homo sapiens
agggccaccagggactc

SEQ ID NO: 608 - DNA, 30 bp, Homo sapiens
tctagctatcgctctctgaacatgtgtagc

SEQ ID NO: 609 - DNA, 24 bp, Homo sapiens
tccaaggcctagagaatggctcac

SEQ ID NO: 610 - DNA, 24 bp, Homo sapiens
acagagaagatcctagccgtgacc

SEQ ID NO: 611 - DNA, 28 bp, Homo sapiens
acgtctctgttgtttccatgtgagatgg

SEQ ID NO: 612 - DNA, 29 bp, Homo sapiens
tcagtgattgcaacattgactatgcttcc

SEQ ID NO: 613 - DNA, 25 bp, Homo sapiens
aactctggtctgaagacatctgtgc

SEQ ID NO: 614 - DNA, 18 bp, Homo sapiens
tcagcgtctgcgtgcacc

SEQ ID NO: 615 - DNA, 25 bp, Homo sapiens
tgctgaagcatgcacattgtgaagc

SEQ ID NO: 616 - DNA, 19 bp, Homo sapiens
agtcaggccgagcagtgtg

SEQ ID NO: 617 - DNA, 19 bp, Homo sapiens
acactgctcggcctgactc

SEQ ID NO: 618 - DNA, 27 bp, Homo sapiens
actagaggacaagacaagcacagtgtc

SEQ ID NO: 619 - DNA, 18 bp, Homo sapiens
tgccaccctgcccaagtc

SEQ ID NO: 620 - DNA, 25 bp, Homo sapiens
tgaaacatggagcctttgagcatcc

SEQ ID NO: 621 - DNA, 21 bp, Homo sapiens
gccgtctgctcaatcacctgg

SEQ ID NO: 622 - DNA, 22 bp, Homo sapiens
acctttgtgccctctcaagtgc

SEQ ID NO: 623 - DNA, 20 bp, Homo sapiens
gggcccaaatgcactccaag

SEQ ID NO: 624 - DNA, 19 bp, Homo sapiens
aggaagggcggttcaggag

SEQ ID NO: 625 - DNA, 25 bp, Homo sapiens
acagggcatcaaggagttaaggcag

SEQ ID NO: 626 - DNA, 29 bp, Homo sapiens
cctctttactttcccttgtatccaagctg

SEQ ID NO: 627 - DNA, 22 bp, Homo sapiens
agagtgtggctgaaggagggtc

SEQ ID NO: 628 - DNA, 29 bp, Homo sapiens
tgttagcatctctcttcaccctttggagg

SEQ ID NO: 629 - DNA, 21 bp, Homo sapiens
ccctccagcccatctcaaagc

SEQ ID NO: 630 - DNA, 30 bp, Homo sapiens
tgtgccaagtattagattccccaaatgctc

SEQ ID NO: 631 - DNA, 29 bp, Homo sapiens
tgctctccaactttctttcctccatttgc

SEQ ID NO: 632 - DNA, 23 bp, Homo sapiens
tcttgggctcccagtatggactg

SEQ ID NO: 633 - DNA, 27 bp, Homo sapiens
agaaggagaagatgggactggtaaacc

SEQ ID NO: 634 - DNA, 19 bp, Homo sapiens
ggagctgctcggctaatcg

SEQ ID NO: 635 - DNA, 23 bp, Homo sapiens
tccccaagagcagactatgtagc

SEQ ID NO: 636 - DNA, 22 bp, Homo sapiens
tcattccctgttacctccctcc

SEQ ID NO: 637 - DNA, 17 bp, Homo sapiens
atggacgcccccagcac

SEQ ID NO: 638 - DNA, 19 bp, Homo sapiens
aatgcgcagcagactggcc

SEQ ID NO: 639 - DNA, 19 bp, Homo sapiens
tgtttacggtgcgccggag

SEQ ID NO: 640 - DNA, 29 bp, Homo sapiens
agcgatagagaccaagaacatgtcattgg

SEQ ID NO: 641 - DNA, 21 bp, Homo sapiens
tgtggaacctgcagacacagg

SEQ ID NO: 642 - DNA, 23 bp, Homo sapiens
tcactcacacagacactcgccag

SEQ ID NO: 643 - DNA, 17 bp, Homo sapiens
agctggggactggcagc

SEQ ID NO: 644 - DNA, 27 bp, Homo sapiens
tgccttgttctttcatccagctatgtg

SEQ ID NO: 645 - DNA, 21 bp, Homo sapiens
tgtgagcggttgtgatgggtg

SEQ ID NO: 646 - DNA, 30 bp, Homo sapiens
gagaactagagttgagattggttcccactc

SEQ ID NO: 647 - DNA, 26 bp, Homo sapiens
agacaatggttcctgtctcactcagg

SEQ ID NO: 648 - DNA, 21 bp, Homo sapiens
tgaatgcagctgagtctccgg

SEQ ID NO: 649 - DNA, 24 bp, Homo sapiens
ctctgccagttctgcttggttagg

SEQ ID NO: 650 - DNA, 23 bp, Homo sapiens
tcgtaccctgtctaagtcccacc

SEQ ID NO: 651 - DNA, 20 bp, Homo sapiens
tgtacgtgtccctgtggctg

SEQ ID NO: 652 - DNA, 17 bp, Homo sapiens
aggctgtgcctcggtgc

SEQ ID NO: 653 - DNA, 19 bp, Homo sapiens
tcgctggacgtggagtcag

SEQ ID NO: 654 - DNA, 23 bp, Homo sapiens
tgctagccttgttctgctacctg

SEQ ID NO: 655 - DNA, 20 bp, Homo sapiens
tctcgtgccctctttggagg

SEQ ID NO: 656 - DNA, 25 bp, Homo sapiens
tctgagactgcccagcaatgtctag

SEQ ID NO: 657 - DNA, 24 bp, Homo sapiens
ctagacattgctgggcagtctcag

SEQ ID NO: 658 - DNA, 19 bp, Homo sapiens
agcaaccctcagccactgc

SEQ ID NO: 659 - DNA, 24 bp, Homo sapiens
agcatgtgtgtatgacctggagct

SEQ ID NO: 660 - DNA, 25 bp, Homo sapiens
aggaggtagcttccataccttgcag

SEQ ID NO: 661 - DNA, 24 bp, Homo sapiens
agctgctattccttaaggcctcac

SEQ ID NO: 662 - DNA, 21 bp, Homo sapiens
ccgggaccatgtcaacaacag

SEQ ID NO: 663 - DNA, 24 bp, Homo sapiens
tgacttggagctctggttctggtc

SEQ ID NO: 664 - DNA, 26 bp, Homo sapiens
tgacctacaggaattgctccttgtcc

SEQ ID NO: 665 - DNA, 18 bp, Homo sapiens
agtccatgggggccttgc

SEQ ID NO: 666 - DNA, 21 bp, Homo sapiens
ggaggactgaggttggtggtc

SEQ ID NO: 667 - DNA, 17 bp, Homo sapiens
acagaccgctcgggcct

SEQ ID NO: 668 - DNA, 25 bp, Homo sapiens
aggaccctgttgtgttaactcacag

SEQ ID NO: 669 - DNA, 27 bp, Homo sapiens
agctgtgagttaacacaacagggtcct

SEQ ID NO: 670 - DNA, 17 bp, Homo sapiens
gtggggtggcaggttcc

SEQ ID NO: 671 - DNA, 24 bp, Homo sapiens
acatgggaaggcaatgctatgctg

SEQ ID NO: 672 - DNA, 27 bp, Homo sapiens
agcttctcatacattcagtagcgcctc

SEQ ID NO: 673 - DNA, 28 bp, Homo sapiens
tactgaatgtatgagaagctggtgctgg

SEQ ID NO: 674 - DNA, 20 bp, Homo sapiens
acgggatgggaggtgaccag

SEQ ID NO: 675 - DNA, 20 bp, Homo sapiens
tgaactgcgtctgcctcctc

SEQ ID NO: 676 - DNA, 21 bp, Homo sapiens
gctccctcattggccattcag

SEQ ID NO: 677 - DNA, 25 bp, Homo sapiens
ccagaagcataaacggtcactcacc

SEQ ID NO: 678 - DNA, 22 bp, Homo sapiens
tgcttgctgagatgcagagtgc

SEQ ID NO: 679 - DNA, 23 bp, Homo sapiens
atggcactctgcatctcagcaag

SEQ ID NO: 680 - DNA, 19 bp, Homo sapiens
agtggccatggaggacagc

SEQ ID NO: 681 - DNA, 20 bp, Homo sapiens
tcatcactcaggctgggtgg

SEQ ID NO: 682 - DNA, 24 bp, Homo sapiens
gaagcctctgcatgaaggtctcac

SEQ ID NO: 683 - DNA, 19 bp, Homo sapiens
tgcagttgctttggggagc

SEQ ID NO: 684 - DNA, 22 bp, Homo sapiens
agctggtgaagacatgacgacc

SEQ ID NO: 685 - DNA, 23 bp, Homo sapiens
agggtcgtcatgtcttcaccagc

SEQ ID NO: 686 - DNA, 17 bp, Homo sapiens
tcctccagcaccgaggg

SEQ ID NO: 687 - DNA, 26 bp, Homo sapiens
tgagcacaggagtaaactgggtagtg

SEQ ID NO: 688 - DNA, 21 bp, Homo sapiens
acagcaatgtccagctggagg

SEQ ID NO: 689 - DNA, 21 bp, Homo sapiens
tgggtccttgctggaaacagg

SEQ ID NO: 690 - DNA, 33 bp, Homo sapiens
agcagtagtgaggtaaagatagaatctgaggca

SEQ ID NO: 691 - DNA, 30 bp, Homo sapiens
agagggtctaggtgattagtcttgaagctg

SEQ ID NO: 692 - DNA, 19 bp, Homo sapiens
cagcccgactaacagctgc

SEQ ID NO: 693 - DNA, 20 bp, Homo sapiens
tgcagctgttagtcgggctg

SEQ ID NO: 694 - DNA, 24 bp, Homo sapiens
aggaactggtaccaccctaaccag

SEQ ID NO: 695 - DNA, 24 bp, Homo sapiens
tgcttcatctcaaagtccagccac

SEQ ID NO: 696 - DNA, 18 bp, Homo sapiens
tgcctcagggtccagtcc

SEQ ID NO: 697 - DNA, 18 bp, Homo sapiens
ggactggaccctgaggca

SEQ ID NO: 698 - DNA, 18 bp, Homo sapiens
ctcccccagcacaactgc

SEQ ID NO: 699 - DNA, 25 bp, Homo sapiens
cccaggactacttccattgtcttcc

SEQ ID NO: 700 - DNA, 24 bp, Homo sapiens
acctcactcctatcccctacagga

SEQ ID NO: 701 - DNA, 23 bp, Homo sapiens
cttagtggtccacctgggaactc

SEQ ID NO: 702 - DNA, 23 bp, Homo sapiens
tccaaagggcacagaaagtctgg

SEQ ID NO: 703 - DNA, 20 bp, Homo sapiens
gcaagtgaaccctagggctg

SEQ ID NO: 704 - DNA, 20 bp, Homo sapiens
aaccccattggtgaccactc

SEQ ID NO: 705 - DNA, 18 bp, Homo sapiens
tcacccgggctgggtatc

SEQ ID NO: 706 - DNA, 20 bp, Homo sapiens
tctccatcacgctcccacag

SEQ ID NO: 707 - DNA, 18 bp, Homo sapiens
gcgggctcccactggata

SEQ ID NO: 708 - DNA, 19 bp, Homo sapiens
tgcatgtcccgtgttgctg

SEQ ID NO: 709 - DNA, 21 bp, Homo sapiens
tcccatgaatcgcctggagac

SEQ ID NO: 710 - DNA, 19 bp, Homo sapiens
gctcaaggcatccacccag

SEQ ID NO: 711 - DNA, 19 bp, Homo sapiens
ctgggtggatgccttgagc

SEQ ID NO: 712 - DNA, 17 bp, Homo sapiens
aggcccagcccctaagg

SEQ ID NO: 713 - DNA, 22 bp, Homo sapiens
ggcttaatggagctgagggagg

SEQ ID NO: 714 - DNA, 17 bp, Homo sapiens
ttcctgctgccgctggg

SEQ ID NO: 715 - DNA, 17 bp, Homo sapiens
acactgccccagtgtgg

SEQ ID NO: 716 - DNA, 21 bp, Homo sapiens
ttagtcactgcagcatggcag

SEQ ID NO: 717 - DNA, 26 bp, Homo sapiens
ggctcctattacaatgtggtcactgg

SEQ ID NO: 718 - DNA, 22 bp, Homo sapiens
ttctccacgtggtggtgttcag

SEQ ID NO: 719 - DNA, 19 bp, Homo sapiens
agtttccctggcctccagg

SEQ ID NO: 720 - DNA, 21 bp, Homo sapiens
cccacccatgatggttcacag

SEQ ID NO: 721 - DNA, 20 bp, Homo sapiens
ggagcatggacaccttctgc

SEQ ID NO: 722 - DNA, 20 bp, Homo sapiens
agaggtgcccttccttcagg

SEQ ID NO: 723 - DNA, 19 bp, Homo sapiens
agggccctaggagtgatgg

SEQ ID NO: 724 - DNA, 32 bp, Homo sapiens
agtcagtctcttaggagtttagttagcaggac

SEQ ID NO: 725 - DNA, 25 bp, Homo sapiens
agcagggtagaaggaaagggaacac

SEQ ID NO: 726 - DNA, 27 bp, Homo sapiens
agaatgtatgtccaccccatctccctg

SEQ ID NO: 727 - DNA, 25 bp, Homo sapiens
atggctttgtggtactcaaaggccg

SEQ ID NO: 728 - DNA, 22 bp, Homo sapiens
tgtgtaggaggagtccagcagc

SEQ ID NO: 729 - DNA, 23 bp, Homo sapiens
ttgcatcacctcaatctgttggg

SEQ ID NO: 730 - DNA, 20 bp, Homo sapiens
aggggtttggggagagacac

SEQ ID NO: 731 - DNA, 31 bp, Homo sapiens
agtaccttcttaaggtgcttgatcaatgtcg

SEQ ID NO: 732 - DNA, 18 bp, Homo sapiens
tgcgcccagacaaacgtg

SEQ ID NO: 733 - DNA, 27 bp, Homo sapiens
ccaaatgtgaaattgtgtggtacacac

SEQ ID NO: 734 - DNA, 25 bp, Homo sapiens
cgagtctggcttctggaaagaacag

SEQ ID NO: 735 - DNA, 21 bp, Homo sapiens
aaagcctgccagctgggattc

SEQ ID NO: 736 - DNA, 28 bp, Homo sapiens
tgcaaacagaaatgaagttttcagggcg

SEQ ID NO: 737 - DNA, 24 bp, Homo sapiens
ttgcacaccatcttaagtgtgacg

SEQ ID NO: 738 - DNA, 19 bp, Homo sapiens
ggaacgcagaggaacctgc

SEQ ID NO: 739 - DNA, 18 bp, Homo sapiens
cgccctccacagtctgtc

SEQ ID NO: 740 - DNA, 19 bp, Homo sapiens
tgctgtccccttttggagg

SEQ ID NO: 741 - DNA, 23 bp, Homo sapiens
aaaggggacagcagtagtgggag

SEQ ID NO: 742 - DNA, 20 bp, Homo sapiens
acctgctggcttctagccac

SEQ ID NO: 743 - DNA, 20 bp, Homo sapiens
tggctagaagccagcaggtg

SEQ ID NO: 744 - DNA, 42 bp, Homo sapiens
cccagatctttctgtagtaatactgatctcttaaccacaacc

SEQ ID NO: 745 - DNA, 26 bp, Homo sapiens
aaatccccacccaaatcaagttggag

SEQ ID NO: 746 - DNA, 18 bp, Homo sapiens
caggcctttggccactgc

SEQ ID NO: 747 - DNA, 28 bp, Homo sapiens
caaggaaggtcctgttgtttaaggatgg

SEQ ID NO: 748 - DNA, 17 bp, Homo sapiens
gccatggcagcgtcagc

SEQ ID NO: 749 - DNA, 27 bp, Homo sapiens
aaatcagagctcctactattgccaagc

SEQ ID NO: 750 - DNA, 26 bp, Homo sapiens
gaagttcagggtcttcccattgcaag

SEQ ID NO: 751 - DNA, 27 bp, Homo sapiens
acccggaacttcttgaagagaacaagg

SEQ ID NO: 752 - DNA, 18 bp, Homo sapiens
ctgcctcccagcacagag

SEQ ID NO: 753 - DNA, 20 bp, Homo sapiens
atcaaccggcctggaaccac

SEQ ID NO: 754 - DNA, 24 bp, Homo sapiens
aaagtagcagcgctggtcattgtg

SEQ ID NO: 755 - DNA, 32 bp, Homo sapiens
cgaatcctacaagactatgacactatgacagg

SEQ ID NO: 756 - DNA, 21 bp, Homo sapiens
ggttttctggacgagggcctt

SEQ ID NO: 757 - DNA, 19 bp, Homo sapiens
catctggcttcaggagccc

SEQ ID NO: 758 - DNA, 23 bp, Homo sapiens
cgtagggtttcagcttcacacag

SEQ ID NO: 759 - DNA, 17 bp, Homo sapiens
ctccagcccagggagtg

SEQ ID NO: 760 - DNA, 25 bp, Homo sapiens
ctctgaactctgggaacaactctgg

SEQ ID NO: 761 - DNA, 24 bp, Homo sapiens
tggtgcgtgggtagtttactcaag

SEQ ID NO: 762 - DNA, 21 bp, Homo sapiens
ctagaaggaccagcacagcct

SEQ ID NO: 763 - DNA, 17 bp, Homo sapiens
acgggacaaggggtccc

SEQ ID NO: 764 - DNA, 36 bp, Homo sapiens
agggtctacggatattattagcatagtcaggacttc

SEQ ID NO: 765 - DNA, 19 bp, Homo sapiens
tccatagacccgcaggagg

SEQ ID NO: 766 - DNA, 21 bp, Homo sapiens
aaagcaagccagtcagtgtgg

SEQ ID NO: 767 - DNA, 28 bp, Homo sapiens
attctccaaactgcctcagaatggttcc

SEQ ID NO: 768 - DNA, 19 bp, Homo sapiens
ggaggagctgatctgcgct

SEQ ID NO: 769 - DNA, 20 bp, Homo sapiens
gcctcccctggtcgtaactg

SEQ ID NO: 770 - DNA, 29 bp, Homo sapiens
taggaatagtgaccgcattccacattcag

SEQ ID NO: 771 - DNA, 31 bp, Homo sapiens
tggacttgggaacctgtaaactagtgaagtc

SEQ ID NO: 772 - DNA, 31 bp, Homo sapiens
gcttacagctcttgtatgtttcaccacactc

SEQ ID NO: 773 - DNA, 22 bp, Homo sapiens
actttgccttctttgcaccagg

SEQ ID NO: 774 - DNA, 18 bp, Homo sapiens
tctctgccagcctcctgc

SEQ ID NO: 775 - DNA, 26 bp, Homo sapiens
tttgccataaggtttgttctggggtg

SEQ ID NO: 776 - DNA, 18 bp, Homo sapiens
aaccctgccccagcacag

SEQ ID NO: 777 - DNA, 29 bp, Homo sapiens
cacacaaggcttttcagtgaaatgctcac

SEQ ID NO: 778 - DNA, 17 bp, Homo sapiens
cgtgcttccctcgggtg

SEQ ID NO: 779 - DNA, 19 bp, Homo sapiens
ttctctaggcctgctgtgg

SEQ ID NO: 780 - DNA, 28 bp, Homo sapiens
taaggaaataccttcataggttcccagg

SEQ ID NO: 781 - DNA, 22 bp, Homo sapiens
tttctaccacctgagcttgtgc

SEQ ID NO: 782 - DNA, 17 bp, Homo sapiens
aggaggagtcccccagg

SEQ ID NO: 783 - DNA, 21 bp, Homo sapiens
tctcacatgggaccagaaagg

SEQ ID NO: 784 - DNA, 21 bp, Homo sapiens
tggagggtcttgtccacttgg

SEQ ID NO: 785 - DNA, 21 bp, Homo sapiens
ttcctgcaaagagctgctctg

SEQ ID NO: 786 - DNA, 28 bp, Homo sapiens
agtaatggcattacttttgagcgtcatc

SEQ ID NO: 787 - DNA, 19 bp, Homo sapiens
ggtaagggcttccccaagc

SEQ ID NO: 788 - DNA, 31 bp, Homo sapiens
cacagtggaaattcttgaatgctattcggtg

SEQ ID NO: 789 - DNA, 28 bp, Homo sapiens
aaacgagggcaatgtgaatctgaaatgc

SEQ ID NO: 790 - DNA, 23 bp, Homo sapiens
aaaggcagaaaggcagaagagtc

SEQ ID NO: 791 - DNA, 28 bp, Homo sapiens
actatgttcgttctctcacagccttctc

SEQ ID NO: 792 - DNA, 29 bp, Homo sapiens
tcacttctgcacacaatgtcatcaaatgc

SEQ ID NO: 793 - DNA, 20 bp, Homo sapiens
aagacagtggaggcaccagg

SEQ ID NO: 794 - DNA, 23 bp, Homo sapiens
gtcagacaggagagctttacagg

SEQ ID NO: 795 - DNA, 22 bp, Homo sapiens
tgcacgcgttctttgaaagcag

SEQ ID NO: 796 - DNA, 21 bp, Homo sapiens
aaagcacttggacgttcctgg

SEQ ID NO: 797 - DNA, 37 bp, Homo sapiens
ttcttcaagatgcctagttaatgacaatgaaattctg

SEQ ID NO: 798 - DNA, 27 bp, Homo sapiens
cactgtaaggattaagggcagagaagg

SEQ ID NO: 799 - DNA, 33 bp, Homo sapiens
ttacttcaaacagttccttgagaatgttggagg

SEQ ID NO: 800 - DNA, 26 bp, Homo sapiens
tgcttcctgaggaaaacacagagtcc

SEQ ID NO: 801 - DNA, 38 bp, Homo sapiens
cacagaataagtactgggggattccatatccttgtagc

SEQ ID NO: 802 - DNA, 37 bp, Homo sapiens
acgctgatctctacaaaggaatacaattttcaagctg

SEQ ID NO: 803 - DNA, 23 bp, Homo sapiens
ttagacaaggagcagcttgtgtg

SEQ ID NO: 804 - DNA, 31 bp, Homo sapiens
ttcttaatcacatcttccaacaggtgagtgg

SEQ ID NO: 805 - DNA, 26 bp, Homo sapiens
tgttgcgctatacaaatcctgaagac

SEQ ID NO: 806 - DNA, 17 bp, Homo sapiens
cactcctgccacccagg

SEQ ID NO: 807 - DNA, 21 bp, Homo sapiens
tgtgtttgcttcgcccctacc

SEQ ID NO: 808 - DNA, 26 bp, Homo sapiens
cagcagcgcacttataatggactgtg

SEQ ID NO: 809 - DNA, 32 bp, Homo sapiens
aagttaacctctgtcagcaaacaaatttaacc

SEQ ID NO: 810 - DNA, 24 bp, Homo sapiens
cctttctcctgaaactcctggagg

SEQ ID NO: 811 - DNA, 27 bp, Homo sapiens
cgatgattaggaggcagcttaaactag

SEQ ID NO: 812 - DNA, 19 bp, Homo sapiens
ctgtcctctgaggaggcac

SEQ ID NO: 813 - DNA, 26 bp, Homo sapiens
ggtagatgcatgacttgtgtgtgatg

SEQ ID NO: 814 - DNA, 31 bp, Homo sapiens
ttggcaattgtgagttactctttccacatgg

SEQ ID NO: 815 - DNA, 26 bp, Homo sapiens
caacatccaaggtctgtgttgagagg

SEQ ID NO: 816 - DNA, 21 bp, Homo sapiens
tcctctttggggatcacgtgg

SEQ ID NO: 817 - DNA, 22 bp, Homo sapiens
cagatccaggaattgaagccca

SEQ ID NO: 818 - DNA, 31 bp, Homo sapiens
taaacccatatgtaactacctggatccagtg

SEQ ID NO: 819 - DNA, 27 bp, Homo sapiens
cttggaagccacattgttttttgtcac

SEQ ID NO: 820 - DNA, 20 bp, Homo sapiens
aggtttcagcatcacggagc

SEQ ID NO: 821 - DNA, 18 bp, Homo sapiens
aggggaagtcaccgggag

SEQ ID NO: 822 - DNA, 19 bp, Homo sapiens
agggcttgagaggaggagg

SEQ ID NO: 823 - DNA, 17 bp, Homo sapiens
tgggtgcactgctcagc

SEQ ID NO: 824 - DNA, 17 bp, Homo sapiens
cagccctcgcgctgtga

SEQ ID NO: 825 - DNA, 19 bp, Homo sapiens
tgcacatgtgctggtggct

SEQ ID NO: 826 - DNA, 22 bp, Homo sapiens
ttcacgtgcaagttatgcctgc

SEQ ID NO: 827 - DNA, 25 bp, Homo sapiens
aaggtcttgggccttttcatcccac

SEQ ID NO: 828 - DNA, 22 bp, Homo sapiens
tgggtaccttctggaaccacag

SEQ ID NO: 829 - DNA, 21 bp, Homo sapiens
ccgtgataggagcagggcttc

SEQ ID NO: 830 - DNA, 23 bp, Homo sapiens
ccaagatcctgtctcagggaagg

SEQ ID NO: 831 - DNA, 23 bp, Homo sapiens
ccttccctgagacaggatcttgg

SEQ ID NO: 832 - DNA, 17 bp, Homo sapiens
agccatggcctctgctg

SEQ ID NO: 833 - DNA, 23 bp, Homo sapiens
catggagggtacagagtgtgtgg

SEQ ID NO: 834 - DNA, 26 bp, Homo sapiens
gggagcctccccaaatatctacagag

SEQ ID NO: 835 - DNA, 17 bp, Homo sapiens
cgaagggcaggcttggt

SEQ ID NO: 836 - DNA, 33 bp, Homo sapiens
agtaggcttgtatgtctacagatgacttcacag

SEQ ID NO: 837 - DNA, 32 bp, Homo sapiens
ctgtgaagtcatctgtagacatacaagcctac

SEQ ID NO: 838 - DNA, 19 bp, Homo sapiens
tggttgggcatagggcctg

SEQ ID NO: 839 - DNA, 37 bp, Homo sapiens
tcttgtcccattctatacctggttatttctgattgag

SEQ ID NO: 840 - DNA, 27 bp, Homo sapiens
tctgatagtactgaagagcctgcaagg

SEQ ID NO: 841 - DNA, 22 bp, Homo sapiens
atggaaatccctcaccacggca

SEQ ID NO: 842 - DNA, 19 bp, Homo sapiens
aggacacagggcccttcct

SEQ ID NO: 843 - DNA, 22 bp, Homo sapiens
agacccaggttagaggctctgc

SEQ ID NO: 844 - DNA, 20 bp, Homo sapiens
gctgggttaaatgtgcaccc

SEQ ID NO: 845 - DNA, 17 bp, Homo sapiens
acgtgggtggcaaggac

SEQ ID NO: 846 - DNA, 20 bp, Homo sapiens
tgtttccttgccggcctcag

SEQ ID NO: 847 - DNA, 18 bp, Homo sapiens
cggagaacaggcctgagg

SEQ ID NO: 848 - DNA, 20 bp, Homo sapiens
gcaggttctacaggctgcac

SEQ ID NO: 849 - DNA, 18 bp, Homo sapiens
gccaagggagccacttcc

SEQ ID NO: 850 - DNA, 18 bp, Homo sapiens
ctcggcctcggtttctcc

SEQ ID NO: 851 - DNA, 23 bp, Homo sapiens
agctacatccggggcctgatgac

SEQ ID NO: 852 - DNA, 20 bp, Homo sapiens
tgtaggagcccagacaaccc

SEQ ID NO: 853 - DNA, 18 bp, Homo sapiens
accctggctgcaactgag

SEQ ID NO: 854 - DNA, 17 bp, Homo sapiens
ccactgcacccacggac

SEQ ID NO: 855 - DNA, 22 bp, Homo sapiens
caatggagggacatgtggttcg

SEQ ID NO: 856 - DNA, 23 bp, Homo sapiens
acaagcaagtgtatttgagcgcc

SEQ ID NO: 857 - DNA, 26 bp, Homo sapiens
ccgcttctgtctttagatacggttgc

SEQ ID NO: 858 - DNA, 27 bp, Homo sapiens
tgtctcagttgttctatcatcagctgg

SEQ ID NO: 859 - DNA, 26 bp, Homo sapiens
atgtgccgtctgattaggaacccaag

SEQ ID NO: 860 - DNA, 20 bp, Homo sapiens
aggcgtccattcgaggtcct

SEQ ID NO: 861 - DNA, 22 bp, Homo sapiens
ggaaacggatagcagagggtgg

SEQ ID NO: 862 - DNA, 26 bp, Homo sapiens
cgggaagttaataggtgacggattcc

SEQ ID NO: 863 - DNA, 24 bp, Homo sapiens
agacgagtcacagatctgaggacc

SEQ ID NO: 864 - DNA, 19 bp, Homo sapiens
gacctgggactgagccctc

SEQ ID NO: 865 - DNA, 24 bp, Homo sapiens
aggatccccctagaaggttctgtc

SEQ ID NO: 866 - DNA, 39 bp, Homo sapiens
ctggaggaatgtttactactactattaatgactggtacc

SEQ ID NO: 867 - DNA, 29 bp, Homo sapiens
acaccgtttttaagctggctcaaggatcc

SEQ ID NO: 868 - DNA, 23 bp, Homo sapiens
atgatgacagcccagggcatcct

SEQ ID NO: 869 - DNA, 23 bp, Homo sapiens
atagccctctccatgcctctctg

SEQ ID NO: 870 - DNA, 29 bp, Homo sapiens
actcttgaacttggcatctcatcttcacg

SEQ ID NO: 871 - DNA, 17 bp, Homo sapiens
tgggcagagcctcccac

SEQ ID NO: 872 - DNA, 27 bp, Homo sapiens
actgaaggagtgagcttgcttgtacac

SEQ ID NO: 873 - DNA, 18 bp, Homo sapiens
actctcgggtacctgggg

SEQ ID NO: 874 - DNA, 27 bp, Homo sapiens
tcttacagtgaagaactgctgggatcc

SEQ ID NO: 875 - DNA, 32 bp, Homo sapiens
cccaaccatacatttctcacagataaaggtgc

SEQ ID NO: 876 - DNA, 21 bp, Homo sapiens
cagcccacgttctctgagacg

SEQ ID NO: 877 - DNA, 21 bp, Homo sapiens
ctgcaaggctgtcggttcatg

SEQ ID NO: 878 - DNA, 18 bp, Homo sapiens
tcccggccatgcctagac

SEQ ID NO: 879 - DNA, 21 bp, Homo sapiens
gccctgcagtttctcctcctg

SEQ ID NO: 880 - DNA, 18 bp, Homo sapiens
agcctggaggacagctgc

SEQ ID NO: 881 - DNA, 23 bp, Homo sapiens
tccctttctgttgcattgggacc

SEQ ID NO: 882 - DNA, 34 bp, Homo sapiens
tcacactgaccttcttaaataacacaagagcctc

SEQ ID NO: 883 - DNA, 18 bp, Homo sapiens
tggccctcactcagcctc

SEQ ID NO: 884 - DNA, 32 bp, Homo sapiens
gtgacaggtagctataacctgtatggtagagc

SEQ ID NO: 885 - DNA, 21 bp, Homo sapiens
actcttcgtttcttgcggctg

SEQ ID NO: 886 - DNA, 27 bp, Homo sapiens
cagagagtcatatacagcagctgggtg

SEQ ID NO: 887 - DNA, 29 bp, Homo sapiens
tgagactctggggacaggaagtatttcag

SEQ ID NO: 888 - DNA, 25 bp, Homo sapiens
aaaaccccaggcatcaacctcagtg

SEQ ID NO: 889 - DNA, 25 bp, Homo sapiens
acggttctggtgtttaagtgaggtc

SEQ ID NO: 890 - DNA, 25 bp, Homo sapiens
aaagctgccctgacatccttcagag

SEQ ID NO: 891 - DNA, 20 bp, Homo sapiens
actccccagctccccatctc

SEQ ID NO: 892 - DNA, 20 bp, Homo sapiens
caagggatggcagtggggac

SEQ ID NO: 893 - DNA, 935 bp, Homo sapiens
aatcttttttatccatgagaattttcttggttctttagctagcatagactccccacagaaggtcccagaggaataagagtttatgaacagactagaactggagagttcgtggcagatgtgccaggttgtcagggggataaagggccgctccttggttctgatttcctcagcagcctgtgcttgatgccaagtggtgttgtccaacccagacctgattcctcccttgactgtcctccgaccttccaattctagctgcatggacattgcacacttggtctcaggagactccagtttcagtttcttagctggttctctgagtgaggtgatggggaatccctagcatttcttagtactgattgtgagcttcccctctgcatgttagcatgcagttcgtgacgattcactacaaatctgctctttatggagggagagtatagggggagcccagtatcactttccaaatcctacccatcctttgaggcccaggcaggccctacctataccacagtttgtcctctgaactctgagagcacttaacttcagggacacccaaattgacatttacatcaagggcatgtgaattattttctattttagaatagagtttgtacttcttgaaaataatattgtaccatgtagctctttttggtaatctttgcattgccttgaatagtgctgattttaaaactagattttaaaatataatttggcatagttcaataagtctgggtttcatgtgctgtcttctctatcccaggagattctgtctcatgttattgttaagagcatgtgtggcatgcctagcaagaaacctgaagccagctccttgagattgctccctctttcactctggagattcctaaaagtcaatgcaagaattctagaaaggagcccctgatggatgccaagggtgtcatttgaatgggcaccattgt

SEQ ID NO: 894 - DNA, 498 bp, Homo sapiens
atgggcaccattgtgtccaaggtgtgctgtggatatagtttgtgtcataagtgaaggagagctctctgagttcatgttctccaattggagtgccatggacacttcaaagtatctgtccaaagaacatgttcataagagatgccaaaaagcactgtgcttgtttatatccggggcatctttgggccacttggtctttagtcttccaaagactgattgccttatggaagtagagactgttcaacatggaatacttaataagcaggtgcttaataaacatttgattgattgatgaagggactttaaacttttccaaagatgctaccgctccctttacccctgtctggagaatgcctttcttccttactttcaaatttcctttgttggacactgactgcagatcctggtatcggcagtagcttgagtatcatggcagagcagagaacatcttgctcctaaggaatggactctagggtacctgttttcacctgcagtgttgtc

SEQ ID NO: 895 - DNA, 963 bp, Homo sapiens
atatttgactctaagctaaggggcttttcccactatgccaggctgcctttactgatgttgggcatggtcggaagagctcagaccacggctgccccctctcttcctgggaaagacaccctcagacaggtctttacatcccatcctgttttacgaaggtttctgagaatgagcagggagaaggacctacaagtaacctttatagtcattcagtccaaccacctcactgatgacttggttacccagaggataaagaaaagcttagcttaccagaaactccagcccctgttattatgaaaaagaacaggacaagtcttgagacccctagaggaggcctctgatctggagagaatcgacagaggagccagacccagagtcccctggagggagccaggtctgcagaagctcagaaactcagtcctgcctttcttgcatatggagtccatggtcatagtagcagtgtcctggctctacccagagtgtccaatggcttcctgtccctctggacttgtcatttagtgggcaaagtccaagatcacacctctcactcctgcccccacctcttgcccctgttttatctcacttgggaataatctgttcccatgtgaagccaacgaaaatgagcctccaccagtgtggggtaacccaacaggcagatttggtatggacacagggccccagccagatgaagacatcccaaagttgagaagagttcagtaatcagaaaatctaaaaagatgctcttttaatttcagcacacatgtacattttgtgttgtctggtgagtattaggaattatatttggagagagactgcaatctttatagggttcagggccttttaaggtcttactcggaccttggacaaccaagagggaaagggccaacaggtgtgaggaaaataagttgtgaggctgcagggaggaagaggatggctcaccaggatgaagaaaagggaaggagagga

SEQ ID NO: 896 - DNA, 669 bp, Homo sapiens
tgaaaagggaaggagggcttggcacaggctagcgggaagcctcaggtcaccctgacacctgttgccatggcccggcggcggtttcctgacttgtcaggacgtgtgcacagagagaacaatgggtttgccttgacaggaagatgcttcctgttttgctgcatgggttcattgttgggcattaagagggaggggtctatgtgtctgtgtttttcgtgttgccaaaagctctctgaggggagaagtgggggtgagtgaggacgggggtctgaggaaaggtgaaagggaaaggaagggagcagttattcttccagaattgctcagccaaacctcacgccattctagtttcagccaaccagagagggtggggctggccctgctgtcctactgtccccaagagctctaagcccagagcttttgtgcatgactgagggctgcccagaatccctccttttgttccccagtgagacccggtggtgacctttatcttggcaaggtggcaagggcgacaggaaacttggactgaaataacctctgtggtgaaagcaggggtgggaaatgttgaggctggtctcatggcgagtgataaattagacatccaagatgcccactccccacctccagcctgcccattgctgggccaaccctgcacattcacaaccgaaattgtac

SEQ ID NO: 897 - DNA, 786 bp, Homo sapiens
cccagcccgcagcaggttctcgacaacattcattcccttccaccctctccttcctcctattgacagagttgcttcagcccattttggcattctgtagatttctacagctgagaaatccaaaaataaacttgaattatggtgggtttagcaccgaggcacttctgtgtaaatagcagaagtgaaaagaaaaaaaaggccatctcatttctagtatttgaaaccaagcaccctcatcgtgtgggcgactcatagtagagggggcagggggagcgaggtttggcattttttctctgctgtttttgtttttgttctgtgatgatgtgggggactctccagggacatcatgcgtcacagagcaggggagaaaggggaggtgaagacagagcaagtagggaaatttgatccggtctctgacgttgtagggcagaattggggaaagagggagtgtcggtcaatgggtggaaaaggtcccgtggctgtcatgcccttcttacctcctgccccgagacacagttgggcaagtcccttaattcatttttcagtgagtttcccaagaaaggccgtcttccggaacatgtgttattcctgaaatacatggcagactcggttgaaagggtgtgtgtttgtgggtcacagagactcacaaaaagagaaggcaaggggctggcccgcttgacgtgagcccacatggatgggagtcacaggtgattattattattattaacaaaaggcttcccttacctccccaaacctaacttttcactattcataccatccatgtcttat

SEQ ID NO: 898 - DNA, 967 bp, Homo sapiens
tttttttctttttttttcaggaaaggcttttgcaggtgggtgccctccttctagcaggcctgaggctcagggaaggggcaggcctctgttcttgcctgttttagggcggtggaaaagacctcactcggccgtcaggagagtaatcttgtgcctagaaagttctttctgctttctcgtgtctaccccatcctcctccctgagcatggtgaagctcagtgcagcatgtttattttcaaaggcttgacaggcccaggcccttcctatctgttcagcctggtccaggccaccaggcaagctgtttacaagggatccaagtgctcggtggagagcagaacaggccgagagtgttttccacggctgccgagaaagatgagcgagtggaggcagaataacaaaaagccacttcaaaaacacaccagaaaaagtcacaaagcagagacaatcagaggtttgagacacacacacccccaaaaccctgacaagagagcgaaaacaagtcatgagggagcctctgatggtttcaagacagtcgcggttgctgattgagaacaggcctgtcccagcagttctcagaggagtcgggagctgcggctgtggggggtcagaaacttcacctgagttctgagaattgtggtgggacagtccctgagggctccgtctctctgggaagatggtggggggcgggtgagaatggcaggcccatgctggctgggtgagagtgtgaggctgttccagcctagagactggccaccggtcaggaagcagagtcccacctggccccaggcttctggcacctactgcctgagagcgtgaggcctctatggccatagtccacctgggaattcaaaggcgtaaggccacctgcatctaggaagctccttctttgggatctgagctgaggacccaacagtgaagaagccaagccagaagggaaacgctggtgctccgctccaccttgccccatttt

SEQ ID NO: 899 - DNA, 600 bp, Homo sapiens
tttagtccacttagggcatgggtggtatttaagctgcatgcctgactagacccaaccagacccgatcagactcagccttttagcaccaagtcgtttgggctaggatgcggtttgtatgagtttagtctacccctcactcaccttccataccccgacagccagaaaaagacaggtggtaacagtttccacctctggtttctgggcccagacctccaggcctgtacacagagcctggggcctggactcacacttttccccagttggctgcctgtcccagcatgggtctctgctgcctacatctttgtctgtttgtatcattttatttccttggcggggagcaggctgtgtgtccaggcttttgtaggcttgtcccttcttaggcacataaccccaaatagtgcttcatagaaggttgcccgaaactaccatgatgactgcagatcctaaactcctcagattctgctgggttcttagctaaaatggtatccaacagcccagccccatggtttttccaagttgacgaaacccagcttgtctcaccttttgatatcagggttacagggttggggtggaggtgaagggtgagaaggatcggagacc

SEQ ID NO: 900 - DNA, 665 bp, Homo sapiens
atgtgtcaccgccttgtcagacgagtgcatgacagagacttgggtgcattttctttgtgcgtggggtgaatggcagtgttggtagtgtgtttggcttggctctcacacaggagattcacctgctataggtttcagcttgtaggccccggaaccctgtgggtgcagctactgggaaatctgtctttcaccacatctttttgggttctgtagctgctcaggaagatgaggttttcttatatagccccagcccctggagatgctgggtgagttgtagaatgccaacttcgagagcattaagagagaccctgtaatgattaggcagccctgggattgtagaatggggaacccatggaaggaggagacccccccactttcttacctttcagagaagggaatcatcttattgtagcagaagtttcttaaaattttgcttggacatctaaccttgaaaactgaggttaagaaagtgaagggcttagtccatagaaggaattttcctctgcatgtagtttttctcctatcactacaaaaaaatatgaagaaaagaaaccaaattcgtaccaaggtgctaaatgtgccctagaatgtaaagcaactttgcattggtcaaccggacccagtcagggaaatatttccatttattcaacttgtgtacctaagagagg

SEQ ID NO: 901 - DNA, 655 bp, Homo sapiens
ggagagtggggttttgattagccaagactgggatggagaagtagcagcctcatggaagggaatgatgtgagctccaagggcacagtagttggttacacttcagcaaactgcaaccaatgagaacagttctcagaatcaggtcgattacacttataagaagatgtaattttttgtgtgtgttgggggtggtcagggaaatagactgtggacatgagagtgctgctgcttctgagaagtcctgaagggtcctgagaatgagccagctccatgatttatgtctgactaatcagtctcaactagacctgatgggggcaactgaaagtcaaaatttgactctgcagggtgagactgaactcgatgaacatagtttcatagttttaattgagatgctgctttttaatgagtgactgttagtgatgagtgattattgcttttcccatcactcacttccctcactcccctctttccttccccaccctttatcccagatgaggaaaaatcattggtaaaacaaaacaaagagaaagggatttagtgataaagactcaccttgtttcacactgaagactgaaggatctaaaggagaagttcaggttggaccaggagggcttctaggggagagaagaggcagagagagcagggagagagcacaagt

SEQ ID NO: 902 - DNA, 715 bp, Homo sapiens
taactaactaactaggagaaacgaaaaataaagtcttaggagccttgcgagatcccttttgttgaacgaaatgagtccagggacagatttattcaacccaagacttaccaggaacagtgatgaatattcacatgagtctgcttgttgccccgaagagcaagatttatgttcttgtgaaagttttcaacctaacactttatcatatctgattctttgaactggctttttaatgtagagtggcagctgtctctccccagctggaggggaaggaggccatcttctgcatctccttctgagacacttgtgttaatgacgatggcttgcatttgggaggcaatttcatcagttggcattataaggaaaatagcaggcctgccaagctcaatttactggcagaaaaagaaaaggagtgaagaggatattacttattaactatgaaatgcggaccgtacagcacaacactatcttttgaattccccatgattgcagaatcataaggctttcttctggtgtgggagcatactgacacccctcccttgtgctgtggttgtgaaaaggattatgtaaagatgattgctactttcaggagccaccagcctctcaactttatcgaggatgcaggaaaaggtaattcaggaaggatgcaattcacttcaaacctttaacaaatccatgtcatgaaaacctaattcagagaaggtcatttgctggaagg

SEQ ID NO: 903 - DNA, 1109 bp, Homo sapiens
gatcatttgctataatattgttttgcaaccattcaccacatgacaacttagacagttgttctcaggcattttgtatcttttttttttttttttttcaaattaatgagtctttattgagagtgtgctgggtgcctttctttgtgggaaaaccatattggccaagtctctaaagctgatgcacaccccctcattctgtgcaagtgagtctctcagagcctttcagcacccgcctccagtgcctagtgaggtagtcatgccacccgggaaagtgggcaatgctgcctaagaacagtgcccacattccagcaaactgtcatcccagagccttgcaacctcctctccaaacgcttgcaaaaaaacaagtgtgagcgctaacagactccttgccggaaaccaggtagccagagaagctagtgacgcacctgaggaggaaaccagggatcaggacacttcaaagacccagtgctggcaaggtgccccgggcgagggtgactgtcaggacatttctgcatcatccagttatgaaagctgattctatttaattcagtttaattaaaacaggggggccagttccacccaaaggcagaagacgctgtcagcggatgcagagtgagatctgaggaccaggaagcaaaagtagcacctccctcgaatctgccactgatgactgccatcaccccattactcccttccagttacccttcgcgactcactcatcccttacccctcgggaagacactgtccagggcagagtctcccagtccagggccctcggctctggtgaccacatgctctgcactaaaaatcagcaacacatgatcaggcaaatgtgaaggtccaaggcactagggggccagcatatttgaaatcgagatgcccaaagggcaatgagaccaggaattcaggtccctgttcccattgccttttgggaaaggcagtagtgtggcttagttgaactgaggacagacagggacttgctgggaaggggaaatcaaggtgcaggttctcttggaaggaggcaggatcacaagcgggtcctggggtggagagggggaaggtgtgagtggaaagagcaagtgtgcgtgacacaaccggcacagtcggcctct

SEQ ID NO: 904 - DNA, 544 bp, Homo sapiens
ttggtttccctcagaggcctgctggggccaccttttagctacactcttcacacctcattttcccacttcccagaccctctgaacatgtccttctctcttactggttgctcccagttttgctcatcccagggccttgcaccatgtgtagcacaaagattcattacgatcaataccagttagtctaggaactgttctcagagctcggtgacatccctggtgtgggtgcagctggggacagcagcgggactttgactcccatttcctctcatgagctccttggcctggctcccccgggaacttgttgtgagaggaggatcacaacaaggctgggcaggatgagggcatccctgggttctctgtgccattgaaatacaacacggcccctgccgcaggtgagtggatagtgggcccatgtggtttagcataacccagagccaatgtcctcaacagggctgccgatatggtagtgctcacccttcacctggaggcggctatgctccagggcacaatttgacacactttaacaggacagcgtgttggtgca

SEQ ID NO: 905 - DNA, 1507 bp, Homo sapiens
gcacgcttcattctgatccagtgattctttctggccttgagctgggaacatcagaacccagtcccgtggtggctgccagaagatactgttaaaatgcaactagaagaatgttgttttggttctttcacacatcagctgctaatctttgtaggattttccccttcccagggttaagagagagaagaggaagtgaaaacaggaggggagaattttcttaaagcacctcttgccttgtagacaacaaccaaaaaccccctagggtttgaacagtgctgtgtacttttttttttttttgtagcttgttcccatctacagcctgcctcatttggttctcagagctcccccaggtgggaggcagaattctgaactgccccaattccactcttatttgcagacagggggcattcctggggctggagggaagggctgaggactggctcttctggcagaaggaggtattttacagtcattctggagaggcactgggggtttctgagtttcttcatgaaagctgggcagagccttctctacacctggtggagaaaggtctgtgtgaacagggattaagctgactgtcctctgggtggagcccttcggccatggaaggcggaggagctggacttccgagcaccgattcagcatctgctgatctctcccaaccaccagcctctcctggctattggagatctccgactccaaggcccaagccctcccagttgagagctcccaagtgcagtatctactgccaagacaggggtatcttccccagagtccagtaggcatgtttccaaattttcttgttgtttaacagatttcattgacaactcaaaacatgcagctggctagtgggaagcagggagaatctggaggcaaatgagatggagccctcgttctccaagaggtggctgttctcctgatgcagacagacatggacacaaacacagtgtgaggatggaatggaagcgtggtggggaggggaggagagggagcgctacacaggaccaaggcagcctcaccattgcacgttggagccctgatgcccagtcccagggcatagtctcccaatccagggccccctgctctggtgacctcatgctctgcactaaaaatcagcaacacacaaccgggcaagtgtgaaggtccaaggcgccagggggccagtgtatttgaaatagagatggtcccagaaattcaggtccctgttcccatcgccctttgggaaaggcggtagtgtggctcagttgaactgagaacagaaaggggacttgctgggaagggagattaggtggtcctctcctgcctcctgggagttttggctggggattgggaaactgggactggaagagaagctggggatcagggatgtcaggagagaaggggcagtcttcactttgtttggcagagatcaagcgcagggccatttggcatgccagcagggctgaaaatgagccactgtaggacctgggtacacagggcccctctccccctcatgcactccgaggcccat

SEQ ID NO: 906 - DNA, 1603 bp, Homo sapiens
tgcactccgaggcccattcttatgcctctcagacaagtatggtgagttgatcctagattcagtctgggttggggatcagagccctgagcctctcccagcctgcactggccagcccctcctgtccttctggctagtctctgctccttcccatctctgccctggactttccccatagagccttcactccctcatgcaatccccttctctccacttccgctgccctctcccaactgctcagaagctgtgcttccatgaggccttcccttaggagtgcctgtcttccctttctgagctcccctggttcagggggccatgcatatgacaactgccagagggttttggttcatttctttgttctgtctccaaggttctgactccttggggctgaacccaggtctccttcacctctgagtttcccccatcacttggctcttcattaagccatcagtaagtactgcatgagcaaaaggacaagatttatcattggatctcagaggatggcctctgtctaccatcttattttctgaagaagtggctgtttgctttccaggaagaggccggggagagagctggaaggagggtccatagcagatttctcccaggaatctggaagagctgaagtctcatgaggatcaggactgtgggctcagggggcacctagccgggcgcttgggaacgacagaccagtttgctggtttaggcaggagaaagggggtagaaatcttgttaatttctggcagtgtagaaatctacccagtctaccagtttgggagagggttggttttcagggtgaggccagaagaaattccacacagatgtattccagctccttctttctgggggtacagagtagggtgagctataaagagtgaagggatgggaccacctccaagagcagccacctctgacccaagaaccatgtttccaaatggacagagttgatttaacaacgactcaaatatcctacaagttaatacctacttctttctcctcaatcaaggcccagtcatccctggggagaagccttgagtgctgggctgggccctgggtggggaatttaatgtgctgtcattttactgacatctgtagaggtttgaaactggacaaacaggaagtgtcctgtctttaacacttgcacaatctcaagccttttgtgaaatatcaaggagtggaggtcgcaggggcccgtggtgtgaggtgctgtgaggtagccctggacctgtctctgatcctgagagctgggccctctgcagctgagaacgtgccctgcagccgctttccctccttagccgtcgtgcacaacctgtgctgtgagacgctgctgcttgcctggcactgctgttgaatcagtctccatctcctcattttgatggcagcctgggtttgttatccttcaaagatcgtctcttggaaggacaccagcctctgattacatttccgagcctgcctggaggcagctaagctaatccgacacgatttgggtggattcccttctggcctcatgttctgacacaacctctggcagcagtagggtgggaagatggacaaaataattacgccctatgagttgaaaggagaattaaaattaattccctcgtgcaac

SEQ ID NO: 907 - DNA, 747 bp, Homo sapiens
tttctttatgagtacctagtagcagataattcagggctgttctctattccttttgtaacaggtctaatttatggcagtaatttttttaaaaaactatttttttcagtagaattttgtacatatgacttctataacatttaggacatttatccttgcttattataaaaatgatttaattgtagtaaacccggttttgaaaagagaagaataagagatcgcccataatcttaacactgaacacaccggatccagtttgttttcccaaccagtcttcatctgatagcgtgtttaattgcatgatcctaatatacatttactttttgaagaaacctagtttgcacggtcccatgtggctacataatctttctcatcatcgttaaggcacaaaatacctttaggatcataatttactcagccaacttcctgcagctgaaaatttaattatttcttttacctttcaaaccaatgtgtttgcttgtcttttctggactctgccctggggccccggcagagaggaggtggagccgtggaacagggttagacccaactcatcttcacgtcctgcccctcagcccggcccttggcccgacccctgccaaatggctccggctgtgttcaggtgcctgcggaaaggcgctcctacctgtcagcagtgtaagggcatttccaggtcacatctgtcaaggactttcattcatggagcacttgcccactggacacttgccacttgtgtagacacctcctcta

SEQ ID NO: 908 - DNA, 553 bp, Homo sapiens
atattttgggcctgaatcccatccattttttttcaagtgtgtctatcctgacacacattttttttcaagtgtgtctaaaactgtccattttcccctggtttatgtagacctatccaattcccttgggaaactcagtgggaaacatgaaatttactttcgaagtgggtggtgataatgaaaaattaatcttgctacgattctggtaagagaccagacccacacagaccctactttgggcattacctggctgaagccagcagcaaggcagcgcacccttctgacacgcacaggttgccaggggctccacatgcatcagccccctgctttggtgcatcacatatattgctgttgatgtgttcaactctgttgcaaagtgtttggaacagataacatcacagtcggatcatttatcaattctttcactcgcccaccttttgttgttgaaccacatactttgggtaataactacagtttattaggtatgctgtgaacactgtttttaaggagtgcctggctgaaaacacccacaaaatgatttaaaaacacaaagcta

SEQ ID NO: 909 - DNA, 730 bp, Homo sapiens
aaccacagccacctagactctgactgacatttgatggcttcaaggaggtattttaaagctattgtcccagaatacgtggtgtgttttttgaggaggaggaagatctatccacggcacacatcaggaagaggtggttaaaggtcagagagttattctgcagaaaatccatctgatttggtacttcctgaaatttttgacacccaaccagggatgtcttttaaaaggttccccactgctcacagattgacaggaaaccacaacaggggtaaaatgcacgcataacacagcatacatcagacatgagggtagttctctatatagcacagtattttttattattgtaggcttacaaatgatttaagtctgtgtgtttgtgtgtgtgtgtgtactttttcattttggtggtatggaaagctttggagggaagaaggaaaggattccacaaggaatagtttttccatatacatctcccattgcaagaacactgatctccgagtggattcttttgtcttgagtcttttgaattattgatccacaatgatgaaatccctagcacagatgttcaatcttgatgtcatttaatatctcgtacaacagcctgaggctaattttcctctctccaggaaaaatggtttgtaagagttgattgatcaactcaagcccaagatcacaaatataaacttcattggtaaagtgatctactctaatattatcttcagggattagaaaa

SEQ ID NO: 910 - DNA, 1325 bp, Homo sapiens
ttaggggacctgggaccaagtgctagacgggtgtggaggtggctgaccgagggtccttgctgccccttaaagtcaaggagtttaaggcagcctttcctttctttcaagtggctcctcaaagggagccattatctgcagctactgtctcagttttatgtaaagagtatttatcatttgggaatttcccctccccatataatacttttgactcctgaatgcatgcaaaagagctgtaagaaactttctggtgctaaatgagaaaatgtgtgaacataaatgagctagtttaactaaaagttcaccaaaatgtattttaaacatcaggctcttaaaaactcaatagtttgaaatttgcattttaatcagcgtttggctaacaatatgagataaactattagagaagtgtaggtcattctggcaaatagaaagttccatcatttcacacttagaaagctgccacgaagagcttattcttggagtataaaatgcagaatttaggttaagccagtcattttgtagatgaaattgtacactggcaatttcttatggttcaacctaatagtaaaacatttataaacaattgtatcattacaaatacatttagacatcgttttctgctaaactcagtattttcctttccatcctgatcaaagaaacattattgcagtaagccacattataattcagcacgatttcttctaaaaaggctccgagttcctttgagcttgttattgtacagtggatttttcatttgcaaagacgttaagccctccaaatgtgcaaatcatgaagtcagttgttgttccagcaaggtttgcccagcggtaaaaaacaagataaaactaatgcactagctgaaaccaggtggggagaccatgtgtggtagtgcttgggggtggagggaaactatttctgaaatgaggacttaaagtataataccagcttcactgcctgttcacgagaaaccaaagcttcaatttaactgcaggcaataggagtttcacactgtcagcaccaactgtctaaaatccaaaactagtatctaaatgtgtaggatcaaaaccaaaaatctggagggatctagttaaacttcaatatgcatgaccccagattcccctttaaaatatagtccaagtattttatcttttccatagggcattgacattattgtgttaatgtgaaatagctatttacctctccaaacctcggctttatagaatagataattatcacatcctgtaggagagccatttgaaaagacagccttgtttacagacaggagaagttacagaatttaaaactgttagaaaattgggggactatgg

SEQ ID NO: 911 - DNA, 1091 bp, Homo sapiens
ccatctgacttaattccctcatcaactgattgccagtgttgtatggacaggcttggtctggatagacttgtcttcccactgctatttccagccgggcaaaagaaccacttccattctcttagagctttcgataccacagtaaataacctggtatcttgctggggcagttttccacccatattaaactacatctgccccattttgactactagaaaatgtatcaaagaggctgtccaatttgtctgagatgagatggctgaagttcttagccaaataatggccaaagctcaaaacagatctatttgatacaaattcgttctttgacacacaaggaaacagatgtcaagagttgtttccacccagtatcaagcttcctcccctcctctctcaggaggctgaacacacattcctagtcactaatgtgctatgaactgaatagcagtgaatccacttaaattaactcatgctggtacagagtcctctccatataggcacaggacttaacatttatcatttagccattctttcaaagataattcaaacgttacagatttctccatattcctgttaatgtagaaacatattccctttacttttggaatcaaagaccaacttccatatgtgacaatgactataatgtaagaaaactgattttcacaagtgtcttgtacaaataagctactgcagcagtttatagagatagttgggtgagacaagggccctgagtacacaaatttataatggctgagtggtcattccacactgtcactgcattacagaaaaaaactggatgcttgtcttgcatacaaatatgtagtgcattaaaaacactgagacctttttttcatttttttttttattacatttggacctttaagaaacatataccatcagatataccactattcagtaaaaatctattctagtttttgggaagcttatgtgtcacaaactatcttgcttctagtctccaagactttactaagtttatcaaaaaggtgggctctggtctatgggatcctgagccttgaggtttggatgttctgattattgtaaaacaatttcaagtggattaacttaattcccagctg

SEQ ID NO: 912 - DNA, 1096 bp, Homo sapiens
tttttcttctggaatgggctaatcagtttgaattatctagtccattacaagaatattaaattccttgagctttgtgatctattctgtctttggaaaacctggtaaaaaagtaattttttttctatacaataaggatggatttaccagaacatacccagtattaatcataacaaaaagcagtatagataatgtatatgtgctgtgttcactttaataaccacttcataagtaactactctaactatggggactatttctggatcagtaagatccaagtgtagttagttacacactacactcagcttaacacaactcttggtatctgacattgattaaaagtaaaaaagggtaagtgaacaaatacatactcatacatgatcacgtttttaagaagctaccctttgcagaagtaaacaagagaggagactttcaggaagctactgatggggactgggaaggtttaaagctatggctttggtaagcaccccagtgagctgtaggaaggcattgtaagagtagattctgcagcatcaaaggataattctctaaaagaggtgggtgttttctcaattaatctaaattctgaggctttcagcagttgagggctagaaacaagatccaaagaaaagagccatcttcacaacacttaagaaaggtgactgactgagccattaggctcatgatgctaaatggtccaaaagcctttggtggtgtgatatggacaagaaaaaaaattaatacacaaaccacgtaacaccattaaaaccaaaaaacattttttcattaaaaaaagtatttagaacacacaaaacaaggcaacacttattcttttttctcatcttctggtatgggatctgttggtggctcctccactgttgcactgttgctctccgagccagtgttactatcactggttccttcctctgccatactgtcgaccccctcctgcccactctccttgtcctcaggagtagacgtgccttcttcaccattctgttggctctctgttgtttcttcaaggtgtgtctcctctgtaatcacacatttgtcactgtcagttccaagatgaaattttactctagttatgctgacagta

SEQ ID NO: 913 - DNA, 811 bp, Homo sapiens
aatgagagttagtctgtagtgctatggattaaacgaggagaaagcagttgtagaaataatataaggttggtcttttagacactttgtttaaagtcatgctgggctgtttcctgtaagaaattaaaagcatgaggttttagctctaatagtctcaaacgattttcttcaggttttttccttgaactaggacagaatctgagtaaagacctgcaaaccttaagcataagacatgccccattcatagatgccaaaacagaggcaaaggactgagtgtttgtctagttgcaaaattagcaaaaatcagttattttaattttcaagctcgttttaaccacaaaaatgtgctcatgctccaaattcattacaataaaaaacacattcatacaaaacagaaagagactcagatactgaaacttaaaatatgaccatttcaaatgttaatctgctggattaaattttgcagaaatacctggtaaagatatctatattccattacatgttttccagatggttgtcatctgagtaccaagtatgactactgtccctcccacttcttgcaacgatgctccaggaagcctttggttttgttttccataactacttttagcttagtcctgtttacacagtgtactaggcagtgttaaaacagtgccatgaggtaaggtgatctcaaaattacaagtgacgatcaatgtaatcagtactttatgtaagttttatttatacaagttattattattattttttaccttgagggatgcttttaatcaggaaaatcagtatacctagaagtaagggtttttctaggaca

SEQ ID NO: 914 - DNA, 1227 bp, Homo sapiens
atgctgtcctaggacaccaaagacaattaatcttaacggtaataaccacatcttgataaataatgtaagcatttaaaggttaaaatactgaatgtcaatatcatgtcaaatttagtactgggaatcaccctcagtggcaggtaccagaatacttgcacttagaaagaaaaacctaaattaaagacagccgtacaaagtcttggcactgcctctgcgtttgttgctagtgggttacctgtctccatcggaatgttctcgtcgtctttcttctcctcgcctttgttagctgcttgttcttcctcaggaacgatgctgctctgactgcgctcagcttgctctgcggcctccttctccctttcctcctgccttttgcgggcctgttcctctgcctgtgcaatctcagctgcaattttctccatatccacttctactttcagaccgcacaactaatcagaaaaaaacagaactccgtaatgttttttccttataatttttgagccagatatattctttcaaaagttggttttcttgcctataaactatatatatatatctatacacctgtatgtgtgtgtgtgtgtgccaaaaaaatgtggttctaggtcttctctgaaactcttgggtctacaagaaaaaacagcagctctagcagttgtataatataggatattccagagcagctggtgaggcaaaatagtgaaagttctggggtatacataaggcttccgttttacattttgggctaccaactagatttccttgtctgaatgcaaagtgcaaattataaattacatttaatgacgacatttgatgaataaatcacaataaaatgaaagtaattaatgactgtatgggagtttaacatatcagagggctctagcatttacaggcctagaagatatgtgtatactctatgatatttcaaatttattgcaattttgccagagaatgggaacaatcttataaaaaaaggatcctacaggtttataataaagttagccctgtttcaaagtgaacaacattcaataaaaacactattttggaaaaaagaatgaggaaaaataaagtaacaggtatagtgataaaagtatagttaacatattaaacagatacccttttaagttcattgttaaatgaatctgtgctttccaggaatttcctcttcttctcctggtgtcgttcctctatttgaagaagttcagcttctagttttcgctgcaagacagg

SEQ ID NO: 915 - DNA, 1284 bp, Homo sapiens
ggtccatactttcaaacagtgtaccaaataatgttttgaactttagatcatttatcacatgagtctagctaagatttaaaaaatacaaaatgcagcacaaagaaatgattatgatcaataggtaaatgttaaagaatactgtttcaggcctgagcaattccttgggaaaaaatatttagcatagcagtaaagattgataggatgcctcaaaattcttaagttcacacgtatttcttaacgaatatactttccattacaaggttctatattatagtttttaatgacaaacttattaaacatctgggaaaggtccacttccttaaacctcttctccaaatcaggaacaggttagattgacatatttaacaggtagatttaggcatggtgtaggaatcatatcacctgggatttgtggtataggcacatcttattgaaatgaatgttttatgactttacctgatgaaccattaaggactggacctgccgtttgaggacctgcattctagctgttgtgacaactgaccgaacgtctggcaccacactctcactaagaatttcactgatgaggcggtggtttctctggaaacgggcggtggctgtatgcttcattgaaaagccatcatcataatctggagtgaacaaattgttctggaaatcaggtcaccagtaaccataaaaaggagtgtaacaatgttaacacttaattaccaacgaactatggccctcactggcctaacaagtggacctgcccagcgtcatgggagcactggggcagttacttgataaaaaccatacagaggacgtaatgtgttcattggccaaggtagtaatttatctcacagtctttaagtgataatgttgtgtctgagaaggatttggctaaaacataaacgagatacaacatgtctcttctggcttcggaatcaatgtgaaggctgtatgtgatggcagtaattgaaattctgcccaatgtttcactctcttggtagtaacttaaggcatttaacaactaatgaacaacatatgaactgggcagtgactttgtcacttgtagcactttaaaaatgaatgaaaatgcccatttgtaaaattatgacagcagagaatacatcacctctaacaatattcagtttcccaggccctcaagtaattttatagaagaaaaataaatgtctgattccaaatttaatttttgtcagtttacacttagccagctgttgtcagtgtgtaatggtatgacccaagttcatacagtatgggtctggtttatatgcttctgtttcg

SEQ ID NO: 916 - DNA, 683 bp, Homo sapiens
aaaaaaaaaaagagctttctctttagtaatacatattaaaacaaacgctcctctctgaaccacttaatcacctcagtgacccaccagacagggaggaaccacacttaagaaaaccttgttacaggggaaaccctgttacagaggcctatgttgcgctgctatgtcagtttagcacctcccttattgtctggcacttaagtagttcctaaaattctcattattataaatactacagctaaaaactgttgtttttgtaaaaagttaaaaaaattacttttgtttccttttgagtaatttctttaggaaataaacttctgaaattaaaactactgggtaagatacagtttttttaaaactctgtaacctttctactttttaagagtttttcacctttagggttatatatggtacatctgtgctacatctgtctaagttatctgtttttgttgttagcttttgttttcttctttcatttatatggccccagtgttgaccacagatggggacataaggtctaagcaatttgggcttgttcttctttgcatgttagtcgtctgcttccttttttgggggaatggcttctctggttatgatctaattgaacagctatttatcctatgatgaagaggctctcactgaataaaagccttcattgtcttgtgtggataattgcacatgccctc

SEQ ID NO: 917 - DNA, 1727 bp, Homo sapiens
aatgtctatcttttgatagtcctctgttaaagaagtcagtagctgttgtacttcatgcagatgccacctttctgttatgtacatttgacatacatttccacctcccaagtattcctctttctaatcattttcgtactggtatgctaaagacattctcatattggcatcttaattgctacctgaatttactagcaactttaagacccaatctgaaagttaaaaacatcataggcccaagtttcagactgtttctgagtgaatctctttagtccttctcagtgttcatggtgttaatgaaagctttagttattttctacttacgttgctagcctttgtttcctcttgtactgacctccatcctcccaatatctgtagactggattgtcttctgatttttagttctgtatgtttctcttgcattaatcaccccatttgagtaattaaagtgtgaggatgctagtgtgtctttagcactgctgattctgcttaacattcaatactgtttctattccatattctattctctatagtattacattccactgtctgtatttatgagaacatttgacaatattccagtacattatttttaaaaatgacttctgtttttccccacttttatcaacttattcttgtcttcaggtactattattgcttcctccctcattgatattgtctttaaagttcttatagccttcctctttgttactgctactttaagatgggatcttaaatcattttcctgatgttcttgtcgcttgcagctaaagcttctaaccttttgcacatcatagcagtatacagagaaactattaatgtttatacagcacactagatatgtggttgagtgtgttcacactgcaggtggctatctctgggtctcctcgcagcttcagaccctgcctggctgcacaagaccagaacaatcagaacacctgctaactactcatacagaatggcaattaggaagctctgccattcgtgtgcatgtatacaatttgtatgggtataccctcatgtacacccatacaaatagtagcatgagctatatttatacattcttattggatttctgaattaaatggaaaggaaacttcatgtttccacatactcattagcttctcccttaagagcctttaattcagcgaatttagtgaaccaataagaaaacaagatataattagaatgcatttagctttttaaaagcagatgaggcaaaatcctgattgtgatttaaaaacctttcgtgcattttgagtacaaagattttgataaacaatcaataatttttgctattttctgcactgaaaaggatatttctttttcttgtgggaaattcacatacaaatcttactcaatataaccaaaatactaagacgatacttaaattatactttcttttccatttaggataagaaataaaaacttatacttaagagatttctcatatcttaactcacagagaaagcataaacaaaaccccactttttttcttttaccatctggatcttcagcaggctgaatgctcatgtacggttctcctttctccatgcgagattgtctctgtcgactttcttcctctaaagcagcttctgcacgactttttgcatttatgtaagcaaggtacgcgggggaattatgataggccttcatagattcattgtactctatctgaaattcaaatgttttttggttttataattaacattttgcaggttataatgcag

SEQ ID NO: 918 - DNA, 309 bp, Homo sapiens
agcctcagtactgcatcagtgttctgaccaaatcttatgttacttttataaatagtaagccaatgttttatgtactttacacattatctatcccactgtgagcccctaccctaccttttctgcttcgtattcgtttaaatattcttgtttttcttcatcagtgagatctcgccacatgccaccaataatcttgccaatctcccacaactttaggtcagggttggaagcctttacttggtcccagaccttaaaaagaaaacagatgaaatgttaatactgatgtctaaacgtatagacctttaaaaatag

SEQ ID NO: 919 - DNA, 436 bp, Homo sapiens
ataagcaagaatatctccaatcactacagacacttaggatgagttacttcaataacatagtctacgtctctaaaagttcatgtgaatttagaagaaaagtgcttaatttgcataacacggtacatcatattatcaaatacaaatataatagtcaagatcaaaaggtttaacatttctagatagtggttataatgctctgccttttaataaagatattggctactttttttattttaagagtaatgtaggctcatcaccaaaaaaaaaaaaaaaaaaaggaaaacttgaggaaaagaaaataaaaactaccataagcttactgcttagagataattattgtcttctgtgttttcccccttcaaactaacatgtggttgctattatttttataaaaatgagatattaattcatgtagtcttgcagtcctccttcactt

SEQ ID NO: 920 - DNA, 1026 bp, Homo sapiens
ttctggaattttgaaatcagaactaattgctttaaaaaccgtatttttttggacctttcctctgaatatgcacagaaaagctggctaagccgatctaaagttggatgttaagcaaagaagcagcaaagacagtgtcctcactccttaccaggtcctaagcacctacctttctgctgtacctcatgtagggcatcagcggcttatctggtggctttgggggttttggaatcgtgataccagaggatgcctacgaaagagttaaatacattcattattcaactgtaaggagttcactggcaaactgaaaagagagtcccttaaaaaattctaatgcgcctttcttctattcgtccaaatattttcttcactgaaaatagctatcactgcaaattcagaaatgttcaaaagaaaatgactttaagcacataatttttaaatgttttacttagcagtttattgccaatgctttgacaacctggctgcaagaacaaataaaatattacacagtaacccatacattgaaaatatatggttatatatcaaccgtctcaagttcaggacattacctggtaccctcttattctgctcaattaccattacacatacagtcaacacttgattatctgcagcaggatctgaacccttaacacttaccattctcacactgtctacaggggccttaacctattagcactaggaatgtactcccaacaccaccacaaaaacaacttcccaggttcaaaaacaaaaacaattagtgaaataacaaaccaccttacctcctttgccaggctagagattttatttctcttaaggttctgtctgttacctagtggttttcttgtaaaggggaatgagaagtgtgaattaaaagtcacacattgttttgtcctgagtcctaatcacagtgtaaaagcaaacaagtttatcaggaacagagaagtggcagatatcgggcctgattacgttatttttgaggtcttatatcaagaagctccattccattaaaaatgttcagttttatgg

SEQ ID NO: 921 - DNA, 1377 bp, Homo sapiens
tgatcagtttttcctgtggcttaaagtctaggtgagattccagacagcctctggtagaccacccagataacacccatctaaaagtatctatttctgaactttttagtctcctgttaatatacatgactgcatttgattaaagacccagaataagaaaaatcattgctatttcagacaatttgcaaattttcaggagatctctgatattgactctccctgctaggctggagaaatgaagtgttggctttattttaattatcgaaagacaggattggcaaatccttataggaaaactaaagtaacattttgttcgcttccccttctgttgttgctatgataaaaccccagagatactcctccactctgggctgggaccccaatcataaccttatttttcatttgagggctcagggattagcatgtttgtgtccttttccactatgatcaagaaatgtttcctcttcctacaagggtctctctccatccctataactctacttcttcaaagcatttcgccttggaagcagtatttcctctctttccattcctcccatgcattcttgtcacacctcatgctagtgcccaggtagacagacactgtttttggccagcagtgggtaagagagtgagatggccaggggcatggaaactgtcaaaagtggtaggatgggcagccaatacagggaaacctgtatcagggtctatagttctttcaaggggaaagagaattcctataagactaaccttatggattcagaggaacagacacacacaagtctgcttcttcacacataaagttactagaaagtatttccaactcatatccaacacaaaccttcagaattccatgaaatggattacaaataaagttggaattgtgcccataactgaggtggtaagaccactgtcaaaattttttgaaattaaagaggtaaagaattctaaaatgcctatgcttccgagctttaatatgaattaaaacactttaaaaacacagtagtatttgctctttgatatttttcaaagaatcacattttatattaatggaattgctatttcccctcctttctcccaaagaaaggtacacaaatcatctgtatattgagaccagtcaacttacaacaacaacaacaaaaacccaaactaaaaaaacaccccaaaacaataataaagttaaattccagatggttttcaggatagtaaagatttatatcattacacacctccaatttatttaacgtctcagacagacatctttctacaatgtcttaaacatttctttaaaaaaagctgaacatactttagaccctttctggataagattcaattagaaacaaccactgttttgctgtgctgtaaccctctgtcagatgtcaa

SEQ ID NO: 922 - DNA, 1495 bp, Homo sapiens
gctgtaaccctctgtcagatgtcaaaatctgttgttgactctttcaacggcctaggggctatgcttttggagaatgtgtttccatttttgaactgtttctttccttgctactatcaggaaacccacctctagcagcaactctctttccaattttctgctttcaatttccaatggggaggcgggtagaactgtgcttacagaagagcaaggtcctaggaaatctcctatgaataaagttcatggttttgtgaaatttatcttggttactcagttttttgttgttgtttcttttgcaattctcagctgtttctctagcaagaacttatttaagagctttcttctggggcagaatttctattaatgtacagaaataggctgtttttaaagacatttttgtctcaatgtgttttcacacctgtacttaagagaatgttaatcatcatctgaatgaagaactgactaggagtgaattccatcttgtagctatcataagcactccaaaaggtctcgacatgctatacaaagtatttactgtctgagaactacccaagtatactggagtcatcagggaaacccaatgttctctacagcctaccacaagctactggacagggcttcacagattcgttccttgaaaaccactaatgcaatctgcgcacaacaataccatacaggagcttcccctcacccccaaaagtaatgcataactagggtcatagtaaaatcaaaatgcttttattatggtcaaaatcagagccattgagtcctaacagcttaaactagatatagaaagcagggcaagtagtgtaaaacctccacattttctaggcccttcttcatatagcagtttgattatacttcaatttggtgttaagaggacaataatacaaagtaaatgtccacaaaggaccaaaacaccaaattttccatgtccaacaactctctataattaatctactatgtagctagtgtccacgccaaatgttcagttcttaacattcgccaagaaggaatgggaagaaacagatgagtgacttcagatagggagtacactttctcttcctagtctccatcgaacaatctcacttttttaactgagaatcccccacagctacatccaagttaagagcaaaatacttacacaaaaccaaaagacaaattactgtaatattatagttatcatttctattccattaacatagataatcaagaggtgactgtatagagctattaaatgcaatcattcttgtttactgcccgtgaaaaaattgctgcattaacattaagatccatgattgattccgttcattgtttaaactgaaatgttctttatcatttgaaaaccttgccatccattacacttgtgaaacaacatgtttaggccagggaaaaacatgtattgatgcacataaaaattgtatgcattgtgaaatgcatacatacacacactttgtcagaattctttttcagataccatgaaatatgcatggcacat

SEQ ID NO: 923 - DNA, 1292 bp, Homo sapiens
cagataccatgaaatatgcatggcacataaaacttgatatgcttatgaagtacatattatgcagaaacaatgaaaaatttagacaaacaaaacctatcaagctaagcaatatgcttatcaagatagacattcatttgatagctacaagctttcagttccagcttgactacagggtgagagggcttttttgaagttacattaatagaaggcacttgttatttatgaatacagcaaacaaaaaccaggtattaaaaactttacagccattctgggttgtataaattctcaccaacactacattccaatgtagtatttgacttttggattttttatctttagtaagtcatttttataattattggcattttttggtgcttaaacttttttgaatgaaatttaagatgattctaaactaaaagatttgaagtgtatcatccaattttgatatcttaggctgatcacttaaatgaaacatgctaagtttcagaaatcctatctcttatactaaggattagaaatgcacttctcgttgtacatatctagtctgatacttcaaattaatttcattcaaccttcactctgcatttctttgaggtgacattaaaacgtttttctctttttcactgtagagaaatgagtcttagttagaaggtcaactactaaatccaaaagacaaataactatgggtagcgattcaaactggtgtaccagccaaaagctttccagccctgaaaaagccaggtctgaaagaccagcctctactagaaactcaatccttgagactaatgccaatcaccttataaaaatgaaaaatactctttatgtcaaaaaggatatttttaccttaagaaattctgtttgtttacatacagtataagcatcaagtgctcaaggctttaaccctaccaaccaccaaacagaatggatttttcttttcttctatatacattccagatctcactatttattttttcagtgtgagatgctacaacgaatgttgaaaatactcaaaaagctaggttaaaaaattttttttaaatggctgtgcttatgattcaaaaagacctaattctgaaggcatttctggtcaattccagttgtttgccggatgctgtaatagttgattctcctaccgtgacccggctgttggtgcccgggttccctcccagcctgtagttgttgtaggcgagatgactgtatggattgtatcccacaaaccctggtgtgctgggcatttgctgatggaaacaaatgagacaaaaacacgaatgagaaatgagctcaaacgagga

SEQ ID NO: 924 - DNA, 1360 bp, Homo sapiens
cacgaatgagaaatgagctcaaacgaggaaaacacagaaatgaaaaatgatctgcatatggcatgcaaaagcaacctgaatttaaacaagcaatgatgtgttgtaattgttctttttttccactgaggaaattaaatatttttctttcattgagaaacctgtctgcagtgtcttttggttgtttttctctttcttttttgcaggggctgggggtgtttgtgtgactgtgaatgtgtgttttgttttttgaggtaagcaacacactgaagtgtttaaaacattcaggattactttatggtcaacaataggataaaacaacttagcaatatatgaagactgaaataggaaggcttgaagtgtgatcaactagaactctgaaaacactacatgcaaaacaaaatacaatttatttgacatgtggatgccaccaatgtatttatctactaaaaacaaaaaaaagaaatggatctgatttcaacgacagttttaaatcattttatataatgtgagaaatgagtagagactcaaatcgggaagccaggatttgtcaattgaaaagaacatatgttggatttgatggatgtcacatacatgatttaaaacaaagacttgtaagaaatgcatggatttcattctggggtactatctgatctttttaacccagtcattcttttataggatttctcttccatttcttctttgatccatcttccactggtcaatcatgaaaacatttctgcattttgtctcaatgtgaactacttttctagtttatagacttcttttttcatctagtttcctgatagctctcaccctttcaaaatacaactgctcatttcagcaacagaacccttggtttttgtgaattatgtgttgatgtaatcacaaatgggctcttatatagcagtagccttggggctaatacaatgacactcaatgttcatgagaaccaaggcataatgcatagaaagaatatagtagagagagaccaaaattagggtattttaccttgtaaaattcaatcaaaatatgtgacaatttcatttttacatgcaattaacaatatcggtccttaattgtataatgtaaaatacacttaacacattccaactaagctgtagctgttacaaaataaacacaatttcctaaaacatgccgctgcacatatccttagtacccaaaagaaagacatttaagcagatattacatttgatactctttaggagaaaagagaacggctgatcaatttctagtctatacagttagaaaagacgcaaataaagcatatttaagtaggcaaaacacagttgaagtatcaaaggcatgaaagaagtgtatattacttgcagcggtacatttg

SEQ ID NO: 925 - DNA, 1845 bp, Homo sapiens
agaagtaatggaaagaaaaaaggaagaagaataattcatttagtatccattctgttggatgttttaatccctagtcttctatattttgtgtgttaatgtgaaactataatgacacaaaaatataactaaagaaaggcaaaaaaaattcctttttatgcataataaattataaggggacacttggtttttgaaatattttaatctcaaaaaatcaagtttgtcaagatgatgcattgtcagaggcagtatttttgtcaaaatgacaccttcaaaggtagcataaataataagaatcactgttcaacattatgaggcaataatgttataaaaataagggaactaaaaaaaaaaaaatggaaagcaaaacattataattataccatttccaaagctgaagtacatggttagctctttgaggtcagaatctcaattgttcagctccacctgtatagccactagcagaatgccatggagatggtcataacaaatgttcttcgatttaagaaagaaaacaaagcaagcataggactttatagtctactggaattaactttagagcctgtatatgacataaattgaaatgagaacatatggtacggtatctcttttctaaagtatctcactaaagaaaaacaaattgttgataaatgtaactaaaatatgtatctgagggttagtaaatatgagtagttttttagcggagaaaactaagttacacaaggacctaattagtagtgaaaagtagactagcctgaaatttaggtggtgggggtatggaaggaaggattaatattaaagaactaattttgtagaatttggtcatgctaacagtgtttttttaaaaacaaacaaaaccccccctcccaaaaaaccaacaaggaagccatttcagcaagacctgaacagttactgctaaatctgttttgtgggttggaaaattattttacatgctgaccaagctgggccagagcttcctgggtgaaaaaacacgttcacaactacttaaaacatatatacttccaaaccaataaaatataatttatggagtggaataagattcaatagcaagatctgccccatagataatgaaatctttacttgaacagcttgaaaatatttacaatgagtagtttcagaagctttattgtttaatatgaaaattttagagagagacaagaaaggagagaaaaacataaccagttgaaggttaggtttaacaaaatagccagaatgagcattcactcagtaacaacttaaagactcttaatagtgaagattaataagaaagaaatggtaaaactttcacttatttcccatttacaaagaaaaaacaaaacaaactgagcacaggaggttggagttttacagtactgtttctttaaatgttggggttggttcaaggaaagatgcaaataattattttatttagtaggaagtgcttttttttttttcttttaagctgaatttcatcctgttgctgtgatgattgagtgactgtcactggaagacatctgggtttttgtatcaaggccagagttggctattacattaacaagaaaattaaaacttactgttgcaggagctggggtgggaggtggggcataagatggtctttctgtttgaaagaaaataaataacttcttgtaaacaactgagatataatactatgcaacaaaactaccaatggtcctgttttgaagaaaaaaaaatgagagtattttggaattcccacttgctagggcattagtctcttattaacatagattgataaatataaaaattgaaacttacttgacattttggaagattaagttctcagttccttaagaatgaatctgagacact

SEQ ID NO: 926 - DNA, 508 bp, Homo sapiens
ctcagcaagcatacgagaatgttttcctaatgaatagggtaatttaattggtatttctgagtaaaattacttcaccttaattcctagtaattaagccttttgtgtattttaactagttcttataggtcatttggttgattagaattaaatgactaaaataaagtactggggatatttagaaatgtactttcaggttttttcttgtgatactaagctacctcttgtatggaaaacattttgctgacgccatgtaaacatttcatcagactgatacaaggatgagaatagaaagtgatgtattatcagggtccaacgcaacaaggcctaccagatactgacagctccctgatcagcaactgtatcatgcttttgggataacaatttttattaaaattaggcagcattttattcctggaagcagtgcaaaaggtaattggtatgacaatgaacttcacattctcttataatggtaaatagcttcataaatgctgggaataaattttgagag

SEQ ID NO: 927 - DNA, 469 bp, Homo sapiens
aggacctagctcaattcttaggaaattttttcctagtattaccagctcacaacataaccaggcacatgtgagcttgttctttacatcaacatacatcacaaatagtgaggtacaaaaagacaaaaattcatctttggaaagaaggcaaataaacttctatgactattggaggtatttgcaaccaaacatgtggaatagatctgatttttcgcttctattattaattttaaggaaattccctggagcataaggaatgagtcctggtgtggaaagaaacagctcattttctcaatggtccaacctgagtctttccctcttaaagaacagccagaaacctttgactctggtgtagatttcctttctgctcacattaagggagctgtcaacatccagcaggcctcgctgcaggggaccctgacaactaacataagctccctgtacgttatacttcattgttaatactttaaaa

SEQ ID NO: 928 - DNA, 1173 bp, Homo sapiens
tgaaccaatgggggaaccttctgcccgggtggggggtgaaccacggacctgccttgcccacggcttcctgaggtcgctctctttgtcttggagaatgtactttactagcaactcccctaaaacggggtattcacaggtgctttgaccaatttcgggggactggccttgcctccaaggagggggccccagatgggactccctcccaaccctcgctctgctaggcctcaaggaggcctcaaccggctcctggctctggccccacggccaaggctgaaccccagcaacccccgggaactcggggtctagccaagcggggacaccacgacttgcacccaccgacccggtccgtcccacttggaaacactcacccgcgggcagaaaaagcgcccgcagctccggcttcgcttccctttgtcccgcgctcgccccgcccctcgcgtccggagcttccgcactcgcactttccacactcttcttaatttttttttttttccgggccccacccgaccctctttagaaaaactaaccttctagtgaagatgcggtgatgcttagcacactcagggatttttttcaggacccattggatcctcaaaactccccgaattttgatactttcccagccgggcgctgattcgtcacggcgaagagggccgaggaggcccgacctaacacagaataggcctgggtttagcggctgtgaggagccggagccgccgcagcgaccgaggaagtggcgggaggtgccgagccttgcggaggggcggtgggggccgcggtgggagacggcggatggcgctcagcgcgaggccgcggaaccactgtggcagcaagcagttcggccagactcccgctgagcccgctcctggaggggccctccccgactccggtcttgctttcctttaggctgtgggtcagagtctacacttcactaaacctgggatggaggcgtggaggacttgcttcgcggcgtttgcgtcctcgcaggcgcctcgcagggcttcctgccctcacggcgggggagtagctttggcgaaaatcagcacgagttctgcagtttttccaagcgcttttagggtgtaatcgtcccaggtttctaagccaaggcccggagagttgaccccctcgcaacagcttgtgtgtccttgcagcgccgcgggtgccacctggtct

SEQ ID NO: 929 - DNA, 445 bp, Homo sapiens
ggcagccctctgtgccactccagggctctttccactaaatcatgagtatgttggtttaccagatggaatgagtagcctcttctttggatacataaacacccgatggatattgtgggtcactgtggagggagaatgaacgtatgggatccctgacctgtggttactggaaaacagttgacatttagagagaggctgaattcttgggcttcccgtagcccccatcctgagtgtgccaacagggactagaagcatctctagtctgcaaagcgaggaacaagtgatactctgtccaatttttccaatattgttatactcatgaatagagattaatgaaattgaagagcatattcaagagaaagactaaaggagaagtcgtctgccccgtggacaggcagcttgagtggtgcttgagaaaatgtacatgaaattgcttgttaaaaaatat

SEQ ID NO: 930 - DNA, 322 bp, Homo sapiens
ccatcagagacatgtaaaggattaaagtacgatacacaaaggcctcagaagggatttcagtacattctttttctggcttcgtccagcaactccagcctggtttcttccctgcctttgggattatggtgggaggattgggcgagtgcagtgctggggaggcgctgtgtgttgtctctaggcagtcctctgaagaaaaactgcaggttttggatgttaagaataaagcaccctatagtaggaaaggggtggcccaaaaacggcaaaaagggaaaggaggggacctaagtggagcagtgacattgtctgatacactttctcactg

SEQ ID NO: 931 - DNA, 1224 bp, Homo sapiens
ggatataggcaagagataatagaaaaataatctgttctctagtcctgaagaaactaaaactgaagagtgaattatccagcaagatggactttacttattatgagtttttttcccccaaagcaaacaccagaacatatgctcttgcctttagaaggatatttatggtaactacaggacagatgtttggagttgtgattattcccagaaaatttgggatacagcatcaatatgactatttaaactaaatataactataagggtagttgggagcactcacgtgggaccagtggttaaccccagagataatcttaggcccaattaagacctaacttaggccttagttttcattctggcagcaagatccagaaacgtggcctgctttcccctctgacactactcatacttttttggggttcttctttccccaagacagggaagccaaaactaagtaagctaaggttctagtccaggtgtctttgagttctttccattgttctgtgggaagaaacgggtgatggagacagagttaggggtaggactgggaagaaaggagaaaaaaggagaaaataagacagaataaggaaaaacctgaagtccttggacacccagtagtccatgaataggctctaagtgatctatgaaccctttaaaattatactcaatttttatgggcttttttcctgataggttaattctttcatgagattttcaaagaggtgcgtgactcaagaaagattatgaaccaaccactgagccatggagtttgtagtatgttcttttgaagcttttataatggattttttttttcttaaacaagggaaagcgagagcaaagctttacttgacccaaatagcctatgaaagtctgattatagacaacatgatgaaacaaactaattttctcagctgtttctgtgagagcagaaggagttatgggtattctgttttctgtagctggaaatagttgtgaaatattgaagtttagcagctttccaggacagagtgatccacactgttttacagaatttaaaaagcacggtttgctttgagaaccctctatgttgccctcaaaataacctggaggatttgggacatgagtgttgccccatggtgtggaaaaggatgaacgttgaaaacagggtagagctggagaatctgggttgtggggtctattatccactgataatattgggagtctagggcacagtagccaaacgagattgtt

SEQ ID NO: 932 - DNA, 577 bp, Homo sapiens
atgtttcatttttttaattgtagtggaatcattaccttggtaaattcatatcccaatttaaaatgccccaaagcaaataaagcttcattataaattcaaatactgtattttaaaatctacatgttatacacccaatagatgcatactggaattgctacaacaagcagttacattcatgacgaccagtactaagttttttttaacactgcaatagattatgctagatatattgctttattatgatcactgttgcttagtacagtaactttagtacaatagcttatatgattgcatttttaaagctttaataaagttagtagcatttagcaatatcaaatgaaacattttttatgtataggatgtattttaggtcagatgcttatgcaagaataagcacttaacatgctgttatatccttgacaaaacaaaatcatcccttttcactaaatagaataaaccagactaaaaggaatctgaagtaattgaaagaaaattaaaaattttatatccctgtattatgttaaagattatttaacataatattttcctggttaaaacatacatttttctggttgaa

SEQ ID NO: 933 - DNA, 1802 bp, Homo sapiens
aatattttaaaggctgtactaaaatgctaacgtagctatagcccttagatgatactttagctgggaaaaagtatggtgagttgtactcagctactttttctgcttagaaaagaattaagaacttataaatttctaatgtcttaaaacaggtatttattaagatcttaaatatacctgtattaaacaaattaggttattttaaaaactttgcaacaatacctcacttattcacaaatatattttctacccatatttattacaatttgaacgatttaaaaacaaatcctctaaatactcttagcttagataacaataccgttatcttagttcacataaatgattgcaagaaatatttataatacttcatatagtatcttatctacggcttatagcaaacaatctaatcacatttagctttacagttggaaaaactgggatggtgggtaactgttctgataactatagtaactaccttttcaatttgcttttcatgttttgtttgcgcagttggccttctgattttttttctttttttggtgggggatacaacctttaaagttccttgagtaaagtaaatcttccggaaatcagatacttattacaaaaaaaaccttttagatatatgtagattaacttaattgtacttatctcaaattagccctggggtgtgttctatagtttgctcagaatttctcatggaaaataactcatttttctcagtatacaaatgatttatctcaaaaagaagaatcctcattaggtgaatagtgagtccccctttaaaaacttgtttataattgctctttttgaaaaatagaacaaacattgtaggtttaaccagtcatggaataatggtgaataactcagtgtgactcttaacacaatcctattcaaacaattcttttttccttagcgtattcagccattgaaaaaaattacaaagactttactaaaccaggttaatgcttacagtctctgatgaagtttcaagggaaaaagaagactattgggagaatataaagaaagagactgtactggatttgtgattttatttttaagctactccctctcattcatatatatatatatatgtctatctccataattagattcagagaaatgtcctttattgtttttttcttctgaagagaaccacatattgatcataacattttccatacatacgtaataacttacattttgggacagagggagttggtatggcccaccttggtccatcctaacattttccaatcaagtcaaatactatctttggattaattagctgttgatggaggtttgatagagggaatactgcatgatcttctcatgataagcctgacttctatatctggtagattatcctgcttagtctctaaacacccttcatcagtggctgctaaatgaagatcaaatcgaagagaaacagactttttcctcaatcgagggttatctttaaagaaagaaccttcccattctttaataacttcatccactttctctgtcctgaaatgataaaataaaccttttaataatgaagaagtatgggtctattaaaaatatgtattatatatttcatatctatggaaaaatcaagaaatttgtataatttatagtgtatagaatttataatgtacatactttaaaaatcatatgaatagaatttcaaaggaattgtatggaatttctctttaggaattctcatgtttgggttgtatttttggaaaaaaacggcaaagtaaggattcagtactcttccatgagtttttatgtatatatgtcagattaaaaatcacagtata

SEQ ID NO: 934 - DNA, 582 bp, Homo sapiens
tcacagtatactaaaactatgtttggaaacatttaaacaaagaagagtaattactgggattacgcaaagttaatttctttacatatatttattattatttcttagtcaaagtttctttacttactgaatagtgccatgagcttcagtgctctccttaacgatactcccatttaagattgcctgtttggttactgtttctacattttcattctcatacttttgtgggacttttgtagtaaaagatatttcatttataatggctgtgaaaatatcatttatgatatattaaattacagtattgaattactgttcacaaattatattcaaacttttattcaaatattgcttgttttttttcgactttaaagtatttaatttccttataaagtaatccctgtaaatagtacatcacttttcaaatgagtttatttatgtcagaaactcacctgatggtaaaacaaaaccaactctacttgtggtaggctttttgtcttttttcccaccttggatacaaccataatatctgaaatcagaaagaattttattttaagagcaacactgtatcagcaaataattaaaaca

SEQ ID NO: 935 - DNA, 510 bp, Homo sapiens
tatttttgattcagtttatgttttttcaaagatttaataaatgtcaagatttattataggctaaagttgtttcacctagttttcatctagttttatagaggacttagaatttggaagcaagcaagaataaagattttttcatggagaattggaggttatgtcatgctcaaagcaatatgaccttataagtcattacagattatgatgtatgaattaacaagaattcctcttttgatatcttttcctatcaggatatctggtagtcttttaaatcatgactcaaaataatattgctttccgtggttgtaatataattacgttagagtaatgattactgttttgaggtttgatgtgtggtatagggtgagcccttgatcagggggattgtggtgattgtgaattttccaggcttttgttatgggtgatccttagaaggcacagactaatcctagaagagatgaatggcaaggaaagtgagaaagttaggaaaggtctctctctctctctctc

SEQ ID NO: 936 - DNA, 561 bp, Homo sapiens
aagactacaagatcatttttgtagtaatctagaattgtttacattttgttctaggtgactttggctgtttggttcctaattttggaagactagaaatggttctttcatatattctttgcagtgcataccttattgtatgggctcagtgagtacaccatgatgatgatggggtttttggatttaatttctctgactacatcaacaatggcataagtggctctgtatttctggccccttgtcattaactaaatggatttaggtacctgatttcttctttttctaggaggtggcgataagttgctatttcttgttccagcctcatcttcgtgttgagaagcatctcgtgctcttgaagctgcttttcgatgccgcgccttacttcctgtagctctttttctagtccttcaatcacagtctctaggtcttgcagctgcatctggtaatgctgctcgctggcatgtagggagttttcaaggcccctttcctgttttatatagattttcatcagtgaatcagtaacacagaatgtgtttctgaaatctgatttgcaatatcttcatc

SEQ ID NO: 937 - DNA, 689 bp, Homo sapiens
agcctaaatattttttattcgacgtctcaatggcatggataaaagaatctccactgttaagactttggataataacgaatgctctattccctatcttcagcaactagaaaatcccaaggtaataagaaaggatttcttcatttttacaggtctgaactaaaccttgagtgagttggtaacagccactgccacaatggagggaggggtgagtaattaaactaggatcagggatagaattcagtggccttgatttccagtttctcatggtaaataaacagacattcatcttttccttctcttaatcaaatcacatctgaggactcgatgggtcggttacttttgggatcattctcaccacagcatggagagattcaatttccacttgcaggtggtgccactggcgtcgggcctccttgagttctgcttgagctgccttcaaagcctcttcatctttgtccatttttttgcttatgtcttcttctagctaacaagaaagccaacagcaacaataacaaacaaaaaacaaggagtgcttctgaaaatgagatgtgtaaaagcaattatagaaaaattgtataggaatcaaagcatttttccttaactcattagattataatgtgtgtcctagtgcctagttaactaattaaatatgtaagtccattgcgttcttagcccgttttctcctatgt

SEQ ID NO: 938 - DNA, 583 bp, Homo sapiens
aatatggaaaaatacatttacatgaatgaaaacagtttgcaggaccaagattcgtgatctctgatttttaacttttcattatttatggatcactaggaggaaggattgaaaattagctatttccccccacattttcttgtaggctgctttgcagaagcagataaacagccgtacccccaaaactgatcaattctgggaccaggtatagggatagggcgtaaatactgctaggaaatacattactagtaatttagagaattaagttgttataggcaataaggctcacaaatagacttccatattaagaaaatctgttgattgacctttttcaagatgatctttttaaaaggcatattaattttgggtatctgggtaataaaatgaataaataataaaaatgacttctctaaggattgttttctaaatattctcctattaaaaaagtagaatattttatatttagctttaaatgtttttatgttgatgttgaaatgaaaagaaagtatctgttgacagaatttttaacatttggccccaggaacagtgagaacaatgtatagaattgattgtagcattttgaagc

SEQ ID NO: 939 - DNA, 506 bp, Homo sapiens
gtcatgccccaagacgattgaggtcccagatgagttttggggtgttatacaacaatctgtaactaaaatagcttatttagaaatttaaaaaaataactaatcaggctgtcttgaatttatttcagctgactttctgagttatttggaagaaaatcctctaaagtagtttcaaattaaaagacactttaaacaaaactcaccgtagtcttgctttttcatttgaatttactcattttggccctgtgacttgtaaactaaactcatatttctactactgcaaagttaagtgttttgtttatgatttttagaagttgtcatctattgatttttttcttctgtttgtaaaggtgaatgaactatcccaatgcttacctgtaccagtgactttgcttaatctaagatgttgatcattctttatgaaggctgaaaatgttatctagaggtgaaatttacaatggaactaaaaatgagtggctaatggaataaaggcctgacatttttctacc

SEQ ID NO: 940 - DNA, 1343 bp, Homo sapiens
gggtgatattcttaagtaaactttttgctgtatttcagggtttggaagataacttgaacccatatatgataggtaaactaaaaaatcccctaaatttcttaatctttgtttctaaaatatttgtttgtaaatttgtttaaagacttgagaccttaattacttgctgaaggtgattgttactttaaaactaagtctatgaaattaggatttagtccttatctaagtaggctctctttctcttttttaaatacttaaatattacaagctttgtaatggaaagaaatgtttctcatcttatagtacagaagcaaaaatcttagtggagaatcgttaccaatttggggaatttcaatggtcataatttatatcattgtttctgaatgccatgttcacacactcagatgatttctatttataacaatctggtataaaatggaactcgttaaaaagatgatagaaaccttttagaaatatctctagaaagtgtacatgctaataaatcttacttaaagatttttcattttaaagatgttatttaaattatctctgtaaataactccaataatatctttgaagggtatttggaatggttccttcctgaagattgtaagaggttagagtgcaccattttatggtatgttgaccccatgttaatgataggaacctcacaatttatataaaaatcaaatgcatcaatcaacacttacttaatggcaatttaacaatataatcacagtatttccccctgtagtcccagtcacactgcagtagaagctaaattccttccccaatagatgctgcatcgaaaaggaaatactgtacctcagagaggccgggacaggaattgggtagacatggactgtctccttattctggaaggtgcctgtctgtatgaaatcattacctggatccttgttgagagcaccgtctctatctgatttctggtgaggatcttttcatagtttgccctgatctcattgagtagctgggacagttccattcttttcccatcctccaccttggctaactgaaccttatcgataggatgagtcgctgcggcagtctgctcggtctgcgcggaaggcagggagcctcgcagagttttaaagatgcagagctcctttttcggaggccacggaaattctcatctttctaactaattatgcaaatacagggtaaactctttgctcctattgttattggtatagtagaaatgtcagattcttcatgaaggaaaggaaaatttcaaaaacctgtactggttccctgtaaaaattgagcactttgaggggagggggagttcatttttgtgaaaaggaaatggggcataacataagaaaatt

SEQ ID NO: 941 - DNA, 661 bp, Homo sapiens
cccctgcatatctgcctctgcgttctctctctccccttctaaattcctggtttaatcttgccagctggttgctagatgtgacagaaatatgtcgtgagagtggatctatcattattgttatttgtggagtggctttggctgaattgtatctggagcacagttcaggagataatcagacctgggttctagcccttacagggcctttgcatgcatgtcctgctcttttaatttctgaattaactcacatctggccaggccagtctatgctgggcattctcacagccctctccaaacaaagctgtcctacccacagctcctggtgagaggagaggttccaggttatttctgacccacccctccctacctcctgcaccttccccatcagtcacaacttgattatctatagattggtcagagacctttggagtaggctgagacagaaagctctgactaaagagagtcattaatgattatctaggccaaactgattctctttcttggtaactgggactgagaaatatgaagagaattaggcttgggagtggaggagagagaagaaagcaatgaattaaattcctaaattaaattcagggagcaatgaattaaatgcttcctgctactttaggtagctcctgctaatatccgcctgaaacacagagag

SEQ ID NO: 942 - DNA, 1765 bp, Homo sapiens
cgtttctttaggacattttgtgtgggccctgagtcctcttcattctaagactagactgaaggaacacattgcttttgtttcatcctcccctgagacaatgagcacagattaatttatttgcctgaagaaggtaaaggaaatgaattaccagaaggatggtaagtggctcaaaaacactatagtccccaaatttgtagtgtttacaaacacaagcaaatcagacaggcacccatcattcatcttggtgaatttttatggagtgatttcctgggagtttggaattaaactctgggagaaataacatcttttctaacctgtttgtccttaacaaatgtggcacactcaagaatttgagttttgctttgaagaggaaaaaatattaaaaaggaaaataatggattatttttatgtaatgcatttgggcacatacatttcaccctgtaaatcaatcttgtacacaaggatgtcaaactcaagccatttaatgtttttcctgtcctgcacataaatgttgtgatctgtttttattctaaaaagtataaaagatagaatgatggcaatgtaagtttatattaagtgtttttttccttccaggaagttgtaaatatgaatctgttttcttcagctagacagaacactccaattgatcttttataatcccaaagagcttgggtattattttatttatgaagcataatttctttagcagcttaggattttgtgactccctcttcttaatcaagcatgcattttcataggattataaaggcataattagtcagcaaataaaggcttttttttaaaacttaaaaaattgctataaatgacagggctttactggcttatatcctttttgttatattattgatttttctactcataggagcaggcctctacgtgatatcatttaatcttttgttttatatataagttaagactataattagacgataaagagttttgtgtgggaatatgtttgtcagcattttttagcatgttttcagagtatgtgagagatgcttacatgcctttctatacacactgaacatgcatttcacatgaactgattaagcagagtacattatacatgcaatcttagtcctggcagatgctcacttcattctttgctgctgtaactcaagggcaaaaagcagggcagttttgccaatcaaggactttgccattgggtcctattttctctggcatcttccagatacttccaggtgcttctccttcttaccttgttttttgaggcccaatacacacagatggtcaaaatgagctttactagatagagggtgagctcattttagaacacccagtttatacaattttggtgtattacaattcatgatttttttctagcttagcagactataggcatcttccaaaactattcagaattttctccattccttttttatctggagtgcgttaagtcccaatctttgaagtcatagttgtaggttgaaactgtgctcccatctactcacttgagctacaatatttacgtctcctttcaaatctctagaagggaggtctttgttgggttctaagtacattgtcttcaccaatttgacaggtgttcccttagctcttcctgtctttgaaatattgatttttctaaacctgctttctataacttacgacattggccctgctgtcttctattctgtgtcctgatactctagtcttagtcatttctctgcatcttagtttattctagacaatttatttccttgcacttgcatttatcctttcttgc

SEQ ID NO: 943 - DNA, 1021 bp, Homo sapiens
aaaaaaattgttttttggagggtacattttagcacatttgggaagacatttatatggtagactttgaacccttatgggggatggtgtggagtgttttctgggaaacagaattagtaaagtggaagaggcaggaaatagaaaacttaaggggtggccgatgacagaggaagcaagagtttacagaaatccctcctcctggctttcaacgcccaccctacctgagcaagcttgtgtctcagtgtgaagtttctctgacaacagggactggtccctgtccagtcttggatatatgccctgcacaactcttgtaatagtaacagtctagtcctcagaatcaaacatttagtttaactttacgtgtttgaaatgccttgaatgcaggaccccgctttagttttccattttcacccactctggtagcctccctagaaagactgcgtggacagcttgaggacacctgtgcagatcatgatcaaagggaccacgtagttctagtttttaaataaagttcacgtatctttttgtattatttttgctaattatttgcctttacccaacggcttgaatgattgaactctattttcaggcttaaatattccctctgcactgctgcaactggccggataaatgtgcctactccagcagcaagctctccacatcccgtccccctttctgtctcctccttacttcatgcccccactgcctccttagttttcagctgccagtgcaaagcaccccagctttctctaggctgtgctctgctccctgacagctgctgttctctccccatccctctcttcttcccttgctttcaacttcccagccagtctgagtatttgagcaccttccagctgcttcactgttgtgtcatgccgggggccatgttgcacagccgcggcacacatgtatatccacggggactcctttctgagcctactgggtgcatagaaactggtgttccagaagtgtacagttgagtttttgacaaagagaaattttacaaacaaaattgtggctgtac

SEQ ID NO: 944 - DNA, 740 bp, Homo sapiens
cccattggcttcacagaagagatagcacctgaccttggctattaaatgcacagtatttaaaatatatggattaacaaaattttatttgctcacacctttaagtggggttaaatatacttggtaattgttttcttcttaaccagattgtccttaagggcaaagagtgcgtgtcttacatttctttaaaatttgccccatttccgtcgtcccaccagccccttagacttagtgcttaatgtttttaaacaaacaaatgaatattaaagtaggcaatcttttattgactttgtatcttgtcttgaaaaggagttgattactgttaaaattctcttaaaaatatgttttgagttctgggaatatacattgcaaggttcaagtttgttttgactttctaattgtataattagagaggagtagctcactcaggaattactgttgtgaatgataagcttttcctcttggatgtgaggttgtgttcagattaaagacactaatatggtataccagcaattacacagtttaaggcaactaagttacatctatagaccatatcattttacatgaatataatacttctatttccataaataattccgaatgcttggagaaaacactagtttttattccccaaaatcattgtctttgaaacctccttaaatagccataagactagcaactcatgccttgaaaaaggtagtcactgatatcaacactgtttgagaattggaaaaacatttcca

SEQ ID NO: 945 - DNA, 805 bp, Homo sapiens
ttaatttccagttctctttgataaattctcagtgttaacgactaagacagaatccatccttttttcaactgtatggttctatatgatacctttgatagttaagctatattagtttattaccatacatttggatagttagcaatcaataagttttgtgctatctgtgaaaaataatctggtagtaagataaaagtgtgcataacttattttctgcttcagtacttaacatagttactattttcttgaagactgtagttttgtaatactatgctctttggtgagacaaagcgttctgaaatttgtgaacacttcttatttcctggtaattattttttttggcccccccagtttgacttttctttctttttggcttcttatatcactgtcccacgttaaaaaatttaacagattttaagatgtcttttggcttaaattgcaaacaattacatttgaaaattaatgaacttcgcgaaatttagtccagcctatatgaaaaagaaaactgttgtcagggtgagaatagatgattcgtgatttcagattctgccacacctttacaaatatttttcacactgttgccttcagaaaaattcattatgctaatccatcaagcttcagttccttcttaattgtttttttcaaacgtctcttctcactggtggcttggcgccatctctcactgctgacttcagaaatgaaatgtgatgatatgctgacataccagtgtcacaagctttgttacctttgaaaatcattatctttgaaacttctgcaagtagccacaaaacgagtgactcataccttt

SEQ ID NO: 946 - DNA, 532 bp, Homo sapiens
tgtgcctcatacctcaaaagagatggtcattgaagtcagtactgtttcagaattaggaaaacattttcagttgtctttgagaaatcctaagtgtcaatcttagagcttgaggaaacaaacaaacaacaaccagaattcaccactttttcaactgtgtgctttttctttgatacctctgataatttagctatgttaccttattactgtacttgcatgttgtaaatgatcaatacatggtttttaaattgagtagggtatctacaagacacacttaactgcataatttgtgtctaaatatgtcatgtatgtattttttttgtgtgactcacttatagaaaggacttccctgttgtggttcttcggttgagataattaacacctcaaaatatcatatatagttctgaatttctagagttttattagttgtaaagtgattttagaaatgcactctgattctaaatgtttgtcatgtggatagaaattttgctatgaataatacattttcattaaaataaagacgtgtttttcatgc

SEQ ID NO: 947 - DNA, 933 bp, Homo sapiens
gttttttactggcctctttggcccatattgaattattatctgtgagttcccaggcacttatcatctgtgctacttactacttttagttctatgtgacattctgatgccattgaattatttcaagagtatctcccacatctccagatgggctgtaccttctagaagggaatatttgtctcttattgtttactgtctggagtctggagtgcttagccaagcactggacccaaattgattgcttcagaccagagctaaaaactgcaaggttagaccttctgaattagaagtgtactcatttttgttaagtccacaaagattaaaaaattccaaaatgtagatgggtgcattcacatgacattactgaagatgagcaaaaacattccctaaatatcctgctggcttttatttttcctagtgtaaaaagatgagtattgttgaaatacattcccttgtcttcatggcttttgcaaagtttcactctatacattgcttcagttatccaatatacgtgaccaaggttaaatggttcttggtgctttatttgtcttagtttttgtggctagcttgtgtggtgctccttaaactggtctttggtgaacacctcttatttgtgataaaacaacaatgccatcaatcagttctttaacaattgtgttgtgccaaaacatttcgttggttctgcgaaaagaaagtgttaggtcaattacatattgatggaaataaagtaaattgataaagcatttctctttaatcaaaagtaagacagctttcgtattgggtacttattaacttttctacctactttcaacagtgagaaagataagcatataaatctcattgattttaatctttgcttttctaaagcttcacaaatttggagtgactttgataaaattcagtcagaattgtagttaatactttatgttagctaca

SEQ ID NO: 948 - DNA, 870 bp, Homo sapiens
ccttaaactaacctacaagttgaaaccttcttgtttaattaactttttgtcttcaattatgcatctttcttcagtctatctcctttccttcttcacctcctttgacctttcaaagaaaatatggattaaaatgcatttccaccttttgattttgaggtgaacgatgttgaaggaaagccatttaaatgtgatatagcaatagcttctaagatatttattactgtttatttaggtgtaagttgaaagaaaaaaaattacaatgctattttgacaaatgtctcagtaaaagtattccacaaccagagtcttgattttatgactctaactgggtaatacaaacattggattcatataaaaacaacacttttagactttggagtacgctgttcctctgaagaaaatgaaatagaataatagaaaacttgtatttagaacttatccttgattttatttcctctttttgatccagtttcaaacttatgactgaaaagaaaaataggatagtcttatactctggttttgattgttgtaggtatcataaaaattgtaatatctgagatttttttttttaaaaagctctatgttgaagtctttgaattttagctttttctatgttttattcgttctgtttttgaattacaccaccctaaatgactatttatcatctaatatgttggatataatacacttgtttccacagacggtctggcagaacaacagttctgcctaaatttcaattcaggtgggcaaacatttgtggtgcaccttgtagccggtggtaatgcatggactaggggctgggttcataaatcgaggccgtggtcattgctttcctagagctggaatggggcattgaaaattgtccttact

SEQ ID NO: 949 - DNA, 658 bp, Homo sapiens
ttatccttactgaatgaaccctgtggaggttgttcagccctggttgtatgtccttgttgcggttagctaaaaatgtaaataggagtcattgagacctatacgtgccccagtcctaactactctccttctttaccatacccacagcttcttgcagaccagctcagccctgtgagcaggcagtggttggtcccagcttcattcaccaggcacgccttgaccttcagcagctgcatttagcctggctctggtccttggtcttgcaatgcccttgaaggagctgggtctccaggcactaacctctacctgaggctggcgcttggcctttgattccatcagcttggctttgagggctgttttctgagagtggagcgaagattgcctaagagaagagatgaaataaagagtcatttgggtagattagcatcagaaagttttcctattctctctgcaggaagggaatatacactggatggatgttactgtctcatcttctaacctcttctctttcaagtaaaacagagataatcttctatgcagatgctgtgttttaagagggcgaggttttgatttaactggaaggaaagtatctcaggatgcctgtcttctgtacctagtgcatccctatggtgtaggaaaatcctgctttcttaaggtagag

SEQ ID NO: 950 - DNA, 510 bp, Homo sapiens
tgttattcaagtttaaatatgttaaatcgtcttaaaaaggagcatatatacttcttgatattcaatgaaatcctagctgacctatacgcaggaattttatctagattaattcttttaagctttcagccaggagccctgcctaatcacctacctggagagagaaacagtgatctcattctgaacgtgggccaacatttccctaacagcaagttcatgctgacatttgtggtatctcagctaattcagtggctgtcgtgtttgcaaaatagggcctgacatgtgcagttaataattttgtttccaggtgtttttcacacattaaatggaaattttcctgtccaagttactaattggaaaagcccaagattttggctttttcttaagaaccctaaaaaaaaccctttttaaagggaatatcatgttttggaaacatattgctgagaatttatgtgaaatcgtgcagttgtctgtgtgggcaattggtttatggtgttttcacccagggaaaga

SEQ ID NO: 951 - DNA, 1268 bp, Homo sapiens
ccactcagggagagatttttatgtaccaagtctactgtagactgtagttcaatctccagggcctacaaggctggctcctgtacattcgtctcagtcttagcagaattggatgcagcagcggcaacctgccgttgcagcattcttttctgaaataccaaaataaaaacagagtcatttatcagtgaagcgaaattgtcctagatttattgaccttggctgtgttttttgtttactttattgttgaatctaatttcagcatcttggtgattgtgattggccatggcttcatagtgcattctcatgtcatgaggagctgtgttagatcagctccaggtgggctgacccattccacctgcaactcagagcctgcaacagctggctggcctttaatttcctgaattggaaacaaccctcgctcaaggaattcggccattatggtaagaaaataacttcatttattagaattttccttcacctcatcagactcaaattgaaggcaggaattatgtaagaaagaggaaagttacgacgtgctgtatgggcacatacctcttcctggttctttttgagatgagtgaactcctccgccgggtttcaatctgcatttctagatcatcttggacaaagtcatgtcattccggacttggtgcagactgttgatgtcagcttgacgctccagcgcagggtcagttcaatctcaaacctggaaaaagtttctaatgctttcagtggtcgttaggtttgtattattaatatcatgctgcattttaaatattttattagaatattatagaaatgccaaacgtctgttccttatttgttgttaatataatttgctattaactttccccatttttggcagtatgatggcactccatataaaatgctgcaagcttcggggaagaaccttttcagcatttttgtttcttagaacagagtgaccataccttgttggcctcttgtgtgttggggtcttctacacacacataaagtagggagttaaattaaagaatcctcagaaacacatgctggttcttttcagaaatctcacttgaaatatacctaactagaaattcttacttacggaagaaaattaagtggtggttccttcggacgtagaatcagcacagcattctcgtaaataatgtgcttccctgaggtttttaactaaaatatttttccattgtttaggattctgtttctaagaagaaaaatattcttttataactgtgattccagtgtaaaaagaagcatggcttcacatagtg

SEQ ID NO: 952 - DNA, 1002 bp, Homo sapiens
ttacctagtgcttatctccatagcttatgtttttcatcatgctgctaagggtaactatatcacacttttgtctgaagtccacagctgctagttttacgctgacgatctgtagcatgaagttgcattgtcagtgtttgcatctgaaatctggaaacgcaggacacaaaaagttgtgtctgatacacttgcattctgaacctctgtatgctggtgttgaggcatgtcaatttcaggtctttcaaacaaattttatatgtatacggttctttaatggaaaatagcatatacctctgcttttgagaataaaagaactgtaaggaatttagtttactttttcttaagtattttggaaacatttctagaattctttccgtaaaatgaactatacaaaagtaaacaaattaggaaaaaaaacatagctaagaagtatattctgttgcttgttaaatttcttccttaatctgccaaattgagaaaagtacaggtatatgtggaagatattgccaatcttttcaaattttgtcatttttagtgtggttctttgtctagcaaaacgtcttaccttgtttttaagttctgtaattatctggtaatacttcttgttgtcctgtttttctccttgatcattagcccaggctcaaatttcttattccattctttgattttatattcaagtgtactctttgcctgcaccagagttgagaccttgtccagggaaactgcaacatggtcatctagattttacactgcatccttcttcttaccagagaagaacccacccacctcctcccaagttggtagaaaatctccatctgggttacatttctgcctataattctttctttccaatgatcagtatctaattgccatagagtagattttggggctgcgtgtgacttgatggaagagcttagctctacaaagcccaacagagagagtggtaagggaatcatcaattagtaattcctcttatggttgataatgtggctgtttcatctctgc

SEQ ID NO: 953 - DNA, 688 bp, Homo sapiens
ttatttgttaaactcaatagactatctttttattaaaaggcgcagaaaatgcctttaggtatttatttcatattggagggacaaagcagataatatttacatgatatcagcccaattaaatttgtgttttcccttatggaatttctgcacaaaggaaaatacctttttataggcacaatgcttataacacaaagtcctttggaatgatatgataaatattacttattttcagatgaagttatttgaaactaattttagggatttctggagaagtaacagaaaggggcagatccttaatttctgtatcctgtatattaaatatttgaagtatttaagaataaaatttaggaaaataatatgaaaataaatgacattcttctatttttttcttgaatttgattgattctaagaaaataaaaatttaaatttattaaagcctgtcttggaattttgaaatagctaatgatgtctaactttttccccttatcttatgaaagtatatgacctctcccctgcccaagagagttaaagaagaatggaggaactgacataatagagttttgtgggtggatttaatgttaaatagcaaacttgtaagtttctccaggttcttgtaaacctctgcagtggctgtgtcttgctccttttgcggttccttttgcaatcataggaaaaaaaaaaaacatga

SEQ ID NO: 954 - DNA, 734 bp, Homo sapiens
ccccatgatttctatattaccaaatgcatttttcttcatgtttgttgtcagtgcagtgagataaacccagaggttgatgaaggatgtttctatctatcgttcgtcaatcaatcaatctttaatgaaaggtgttagacaatattttttggtaaaaacaaacgtggtgtgagttgatgttctttctctgaatggcttttgcttcattttactttattggagagtctgagtttatccctatggcttcgaacatcctagtcactaaataaatatattttttaacacttttgttaaaattgaaacaacttaacactcattcttagaaaaaatattccaatgacaaatttaggaaacttatatatcaagctgatattgttattggcaagtgtggggctattggtggatgctacttgtattttagttctgttgcttttgcttttttttaatgacacaaaatatatttaatacgttaaatgagagactaggaaatatatttaaagatctttcaggctgacataatgaccgcaaataagtaagacaaaaaagctttggtaaaataagtagaattaaaaaaatgcagttctgtgaattaacacaagaaaacatcagatgaagaataaagtttctctgccaaagttccagctcaacagtgctgtgaatgtgatgtggctgctgctgttagacaatattaaaaaatttacaaagcccagaggtcgtcttcccccagctcttggccc

SEQ ID NO: 955 - DNA, 517 bp, Homo sapiens
tttttatttttaaaaaattggttttcaatgaaatagtttcctccagttgctactactgtgagattatgaagctcatttcaagatgctcctgtcctgcttagaaagctggtcttcccctggttttgcccttaacttgaaatccagcttcagttttagtggccaaagggccatgtggtagcctgctttatatctgaactcagaccaatgggtatcttttttagttcttctggtctccaatgtcaacaggtttctcctgtctacatagatagaaaactgttctggaaattttgaagcctccctgtttaggcgagggagaagcagttttggaaaaatgaaaaaaaaaaagtacttttggggggtacctctcacagaaataggccacttggtgagtctaggatatgaaactacagaacttcacttattttggtagagtagaattctagctcatggaattaggagatggagctttaacttgtaatttttccactttatttaaagggagaggcctttaaataaa

SEQ ID NO: 956 - DNA, 704 bp, Homo sapiens
gcatgcaatgcacatcctatcgcaattttgttataagctcgcatgtgcttataacaaagcacatgttataagcttcatgttccttgtggttctgtcagcaaaataacttcatcatgccccctctctggaagtccaagctttgtacacaggatacctctgggcttgtcccttacctgctatttaagtgctaacttttaaaaaagtggttgaactattaacatttgcttctttcctgcattatcatttcatattgacattgatattacaaatgagtactttgttttcagaagggcttgatcaatattttctgttacccaagtgtcatatctcagccactgaaaagtttttaaagtggtttattacttgtagtattttgttccttgaggaggttgtgtggataatattacttgagcttcattttgggtgatttatattcaccagtttgtctcctcctgggtgaacactgtctaattccacgaagtcgtcaagccagtttaggccactttccttagagcttcaaatactttagccgtttactctgagctgcctgctgtgaaccttgtttcttgtttgtcatctctgtgaggatggatgccacgtcgaccattctcatcattcttgtgtatacttccctgaggtgagaaagaaaaaacaaccctgtgaatctctggattaaaagtcaacgggtgaaaacccatgtgcga

SEQ ID NO: 957 - DNA, 1750 bp, Homo sapiens
ttgcctggagagctgaactttagggtctcacaataaacatattcctattgtagagttttaaaataattttaaggcaagtaataatgtatgaacaccatgtccttaactttttattcagcactgtaaatacgttttatgatccaaaatggttgaatagtttcagttttcaaaattgaacatgcccttaacaacacattctattgtgtctcagtgttctggtgtctatgattgggccttttctatatttgtaaacaatcattcagtacaaacgcagcatcttaacgcatgacaaggaagaacagatgagggttttcacctcgagatgactttcagagtagccttatacttttgccttgacatgaaaatagtactagccatgaacataggtctcaggtggccaaaatccacagctagaaggttagacttgagaagacccacagagagaggcttcgctgatgtggccgggatggcttaggttctgcaggctgcttacggcagatttccatttctgctcttgagctatgaatccagttggatgagctggttcagacttttagtatttcagcagagaagaagcattcagggttttatttattgtaatgatttgatggtggaaaacagctttgacttaagcaacttaacattgctctttttctttgagtagtggtttaatgtttattctgtggttagctattaaccttattctgtggttagctatttaagcagaagtcataatgtacccagaggttcattttaagttttattcaatgtgcccagaagatgaaaaactacatgttttgatgataggtttgatatgctcacacaattcttaattggttttatattggaagatacatgttcagatttgtccttttataactttacatttggctttttatgccacgtcccgtgttctttccttgaggactggcttgtagagttgattctctaatttgtgatatgggcatattaaattccttgattgagaaagcccttagccagcctgggttggtgctatgcctggttcttcctggggcccgtaccacctcctacccaatcttaacaggtttcatcatcccaaacaagacaagacaaagccatgtggcctcagggatactgtagaaatgaaagaatagggctatgaccaccaacgggatgaaagatcttagcagtggagactggggaaaagaaacaccagcttggcgaagtggcaggttttggctaaagatgtggctagatttggcaggggaacaagtgcctgaggatctcttctctttggggctttcaaggtttcaggaaatcagattgccatatcacatagccaatcttatttcccaagactcttttttggcccctgtcctaaatgtcctgtaaacacacatgtctgattcctatgtcacttctgatgcagattgtgaaatcaagtctttactattaacagctttttattgcttgctgtcttctttgtgttttagctcttcttctctgctgaaatgtgagctttttgaagtaggagggagattttgagtttcttttttatcttataaaatatcgagttcagtgatggacatatataaactagacattaattataagttgattattaaaataatcacatccttctttgtgggctaagccgttgacacggtagtctaatttcagctatcatgccactgagttcttatgtgatgccattaaaaatgcccacattaaaaaaatgactataatctgaattgtataaagaaggtaa

SEQ ID NO: 958 - DNA, 902 bp, Homo sapiens
gtaagatataaagaatgaactgacattagtaatatagtcatgcagctagatcatacttgatagcttccttcctaggtaaaatactttttaaaaaaataagtaataattaacttgcaaaagtaaatttattgaagcatagaaacaattaaagcaaagttgttaattcagctatttcaagagcattctaatgaggaaataagaagatgcagaaaagttggctagtcatccatttctggactgaagcttttcctgaaattatccagaaagatgcctagattgatgccatttcttcgcttgtgtccttcttgatttttttttctttgaaagacacttttgttgatctggaagttccttatttaactttcacctcagaaatactgctgacttgagacgagacaaccttgccatccaccaactcctctacgatagtcttagtcactctagtcttgcttgaatctgaaaatcatgggattgcaatgtcagtctggaaactctcacagaaacacagagcaagagaaattcaatcacatgcattcaacgtgttctgtctgggtaagattatgtaaaaaatagcggactcttttagtatgacaagcaaagtatgtcttcacttttaaattacagaactattatcaatattaaaaaaagtctacctcgtccttgaccagaacagcttccagatcttgagtcaccagataccagatccctggatcccatgtttacagatcctgagtttctaccaccaaattctgcaaaactagaaccactggagaaaaaaagaattatgttttcctttgcagtttgcaaaggcaggagaaagcctccgccccggggattcttcatgatgaagttttggatgtgtttatgtgttttaattggattgtgtctgctgcttttttgtt

SEQ ID NO: 959 - DNA, 1263 bp, Homo sapiens
tgtgtctgttactttattactctctatatatacaagtctaagccctgagtcccattttggttttataaaataaattcactaaggtatgcattttagtttgttcatgactttggtttaccctccctctccatcgagcaggcggcggtaggtctcgatctccacctccaggcgtgtcttgatgtccagcaattgcttgtactctgcgttctggcatttagtctcaccccagatctggcagatctcctcctccagggcactgatctgcgtttgaatttctgacagctgagccacgtagccagcttctgtgtcagccagggttccctccagggagcttttctaagagaaaaagcaaataaaaaattcatgatgaaaataaatcattggatgattttttaaaaatgcaattttatgtggcactagaagtgcaccttcgccatataacctatattgttatatcattgcttctttaattttggttggcacttctttttaaactaaatcttttatgcaaaatagagtacattatctttaacttttaatgctttctataatcataatgcagttctccttaacactgccttttttatgtgcctagtgaacctcttggcaaagaaagaaaactgcatttgcttaactccctgttggaaaatgtgaaaagctatttgcacataccatggccagttgggactgaagctcaatttccagggcttgcagggtacgttttagttctgttatctcattcttggcagaagtggctgccccagcatcagtggagatttgtgcttgtagtgatgcgctctaaatacaaacataatgcagctgttgtaggctgatgaaaggagcagaagcggcttgtgtgtggctactggcttaggtgctcagcagagaggatctacctgcttgttgaaccgctcctcagcctctcggcggttttgctcagccagctcctcgtactgcgccctcatgtcattcagtaatttggtcaggtcggtccctggcgcagcattcatttctacggtcacctcccctccagagcttccttgcatattcttcatttcctagcatgaaggaaaaaagactatcgtgatgcaaacagaaaagtgatgacttccgaaaatgtgcctagacaacaacaatttgaaagtaggacactgaaaggaaaaaaaaaaaatcaaatctaggtataatttactcatgattacttttgtttcctggtcatagtatgtgggaaattcacttagataaaaatgagtttattttacc

SEQ ID NO: 960 - DNA, 655 bp, Homo sapiens
atttgtatagaatgcatatggggagaaatatgttagctagagttattcgtttatgtagaacatgttcctacctcctcgtggttcttcctcaggtaggctagctcctcggtgaaactctcaatctgcatctccaggtcagagcgggtcatagtcaggtcatccaggactttccgcaggccattgatgtcagcctccacgctctgccggagacacagctcgttctcatacctggaaggggcagcagtaaggcaaaaaatactgtgagctcacctggccgtgtttcaaagggtaccttccattcttacatattgaaaaagttctcacttgtgggcattttaataaataaaggttattaagttttctcttgggaaattttcccttgtaaagaaaaataccaatgtaatgttaattctaatcatgtctaacatttttaataataaaattctcattctaaatttgcctctttcttttttctttttcttttttcttttgcagctgttgtaggctgatgaaaggagcagaagcggccggtgtgtagctactggcttaggtgctcagcagagaggatctacctgccccagcatcagtggagatttgtctaatggtctaaagtttacccttgggatgtttgtaaatttaggtcatgatcctctag

SEQ ID NO: 961 - DNA, 1214 bp, Homo sapiens
tgtgctattagcttttaaaggtgacttgctttgcaaacttacttagtaatgactaagtatacagccccagacctgtatatctggggctggtatatttaggactacatctttctgcaaaaagataacagtctgcacatttattggactaggcacaggaacctgttttacaggacatagtcctctgcatatttctgctactttgttagatcattatctcatgagctttttcagaaaatagtgcaaaaattgtatttcacttccaaaaaagtctttaaaaatatatttcccatacaaaagtggctaaacattttagattctactacattcttatgtaatgtttgcaccagattttctgggaagaaaaataatactaaagaatatttaaatcttgtaagacaataaaatgtgtcagtctgtcagaattcatcataaataattagattaaactaatgttgactcactgccaccattcttatatataaatgataattagctgcctggtgttgtataagttttactgttatgtagaaatactgaaactgagatggaaacagaaaattaatgtgattggacatcacataaggtactataataattaagacacatcaggtcccactttgcatatgtaacaagcaaatatgttttcaaataatttcttaaaattttcattatagtacatgatctgaaaagaagtgaaagatccacaaataatagaaactcaggcacagatagtctcacctggtttctgagatcttcaattattgaatagtatttgctataatctcttcccgatccaccgtctccagacccaggcccatatttgtcataccactccttgattttgttctccagatcagtgttagcctcctccagggctctgaccttgtctaggtaattggccaagcggtcattgaggttctgcatggtttgcttttcccctccagagaaaagccccccatcgccaacaccacctcccataccaccaccatagctgtagaagcctccagtagcaccactgctgaatctagaactcccacagaatccagaacccctgccaaatccagagaccccgccaaagctagaacccccaccaaatcctgtcccagagcctgaagctcccccaaaaccaccccctactgagcagctaccaaagccccctccaaagctgcccccaaaagcaccgctagaccccccactcaggctgcagctgctgg

SEQ ID NO: 962 - DNA, 1197 bp, Homo sapiens
ctcctcctcggaagccctgggccgagctgccccccagaccacatctgcttccactgctgaagctgcttccaccagcagacaccctggctgagctgctgcctccagccctggaggaggaggcgcgagacgagcaagacatggtgctcctgcaaacatgagcttgtccaggcgaataggagaggtgatgacgaagagtgtattcaaggctgcctttttggcctttatatacacacttcgagggtgttccttttctctgtcacttcttaatccctgttacagttttggtaatccgtaattggataatttctgtttcttgaacacttctctgaagctaggtcagagccctgggacatttactatatcaataaaaaaagaataaagtggagcaaaacaaaaaaattttcagaattacagttttaatctttcagaggttttgatgattggtaacttttctctggaagtgtagttctattaaatttgcttcatgatttcacatttgcagagaatatctccaggttaacaaatgtaattaaaatacttaatatgatgagaataaaaatttcccatcaatcatgtaacttttttgttcatattgttctcaaaagttgaaattagctttcacatcagcaataatttcagatttgattaagcatccatctctttgattatttcaatcagcgtgttttttaaggttgttgaagtttgtgattttaagttattgctttctttttttgtattttgtataatatacaaaaaagcatataatttgtaacaattatgttttatagttcataagaaaaacataaataatagttttctaggtaagtattattacatctcagcaacatgtttattcaagtagctaatgtctaagaaagattgaaaagcttttaggcagattgttttaatacgattttctttctggttgaattctagtctgatataaagacagcaacttcctttttgagtcaaatttcaagaaatgaagagatgatgcagatatctcctgccttcgttttaaagataaaagaggatttgtatctacttctgataactagtgttacaattggagttattttatagattctgaaccctcctgagctccctttgtgcttcatggctttttgtccctttgtattttagactgtttccattcatgtcttctagtcacttcaccggtttaatagtgtctttttg

SEQ ID NO: 963 - DNA, 609 bp, Homo sapiens
gtcttaaaaaacaggtgcttccagaaatagtttgtatcctccttagctttaaacttaagtagctgacttttgtttatttaagaatttcttccttcttttgccagtctctgttaaactatgttcacaccttaatctttatattcaattatttgttaaacaatgttctgctttaaatttttccttaaattgcattttattgggacacatgattaaataggtaatcattcactttactatgtagctcttatgtggcttttatgatctacctgtactgttttcacaggagtatgatgttactcttcttcatatttagggtgacatatctccaaggggtacatggtgtacaaaattttaaattgttaagctgggagtaatttttataacgcccttctaaagtagctaaaaaatgcaccacacataatgtgttggtcatcctgcctcgcccatccctaaagctgtgaaaccaaagaaaactaaaccctaatgattaaatggtatgcaaatgctggcaatgggaggaacagtcacagagtgtttctcccttttaaaactatgaaatgtaatctttcaattttcataaagacttgcatttggctgaaagcacgttta

SEQ ID NO: 964 - DNA, 508 bp, Homo sapiens
gacagagagagagagacagactgaatcttaggtgtctgggctcccagttcaaattttgaatagtttgtgattagaagtttatttctacctgtaaagaaacatataaaagctatatttccttatagaatatgattttaataataagtgcagaatgatttgcagatagtaaccatcaatttttttttgtgtgtgtgggggatagattattagtatttaaatatttttcagattaacatattgcaggtttttagactagtaggaaaaccaaatactgaaatgcatggcatatggctcctgatgaatctttacagaattgagaacagaacttgggtattctatcttctgttcattcaagaaaatatactgttttgtgtttttcaaatagaagcatcacatcagagtagttaagggaagttgctgggtttagagtatttgttgaatgttgacaaaactttctgtggcagacagtaaaaaagaagggaaaatatacatttaaaaaaattttaac

SEQ ID NO: 965 - DNA, 1248 bp, Homo sapiens
tggaaagtataaatttgatgtgtgaacagtctctttgcaatgccgttgcaatgacagatagtagatagacaataaatattccttgaattaataaaaactaacatggcctgattttcttcatgaacaacttggatcactgattacttttgttctttactatgtgttgtgttttgttttctgaatctttatgctccacttctgggttagtgattctcagtgtgtggtggcggagagcggggcttggcagtaagaggaaatgttgtttgggaagagggcagaaaggtcaggcaagagtcaaccggggaccttcctgtagggaatcattgtttgggccagcttcctgctggtggctgctctaggccccgccagggtcaactacttggaagagaaaaaaggttttgcaataataacatgactaagagcccactccagtagatctggcaccacccgtcgatggattgggtgtgtcattgtcacaccccagaaatccaccaattctgtggctgtttctcttccttcatcactttctctccttccccaccaccctcgtccattctttctcttcctggtttcacttaagtgtgtctatttgaaggcttcctcttctccaccaggaagcatctgcttggtcatgccattttgccaaattttgttctgggaagaaaaatcacctggctttgttcttgtatgtgagtgctttcaaatctctttaaataactcaattctctatgtttcctgaagatctttccgtgagtttatggagaattaagagaatgggtgagtgactttgcgggggttgggatgctttgtcctccaggctccacagataagacagtttgaaataagcacagttttcaaggattagctctgcttaaaaagtccttttgtgcctttcttcataccagacagacagtagtcttctcttcagagaatccaaaagcatgaacaatccagatcataacttgagcagtagggcctagcccctgtgcctcttgccaatgctaagttgatacactgggccttcctgctctgtctcttccagcttgacccctcaacctcctgctgccctctgatgtcagagaagctgcaaatctttggtcaaggaatccagggcttaaatagtagtttcatagcaaaagaatggcatggtattttacacaagatcatattttatatgataggctcagaagaaagcttcatcagtctcaagtctcttgtcctctgtccaccagaactataacacaacat

SEQ ID NO: 966 - DNA, 969 bp, Homo sapiens
ccacatataaggcaatggcagcactcttggagacctttctggtagttagccaaattattattgcccagtgggtgatctctgtgctcatcagaccagtcctggcaagactcaccccagggacagtgacagggacagactggggtgctcagcctacctgcagtggccctggggcatgctgggagagaaaggggcacagggcttaccctaggaggagagggccctggagaagccatggcaaagctgtgaccgtgggtgggcagagctgatcagagtctgcagatttgagctgggcataagaggctgtgggatttggacacaggggccatccatactgttaccagaacgtggagaagagccagtaggaatactggctatgaagccagatccttccagaaagggagaaaggaacaggactctgttgtgatgtggaggctgactaggtggagtgaggagaaggtcccagcaagcaattgtgcttgtcttttttgtgcctgtaaccaggagggagacagagaaaccaggtgcccaggaaaccttgattgaagggtgccaggtaagccctgtccttcccacagtggcattcaacagcaaggccaggacctaccattatctttctgtgtgtagagtggacacaagcacatatttctaaagaggactaatggatgatctttaggtactaacttgtgacccattcattggaggtcactgggtgtttctagaagtacttttgatgtgactgatcttggagcaaagcctcaaatcacaccttattctgttctttctatgtatccaaattttaccacttttcaagggctatctcttctggaacactcttctggaacactccaacccttcatttaccagcttctccttttccccacataatttttcttattattcttacggtttctaccacattacttatcacttggtccttcttgtatttttctttgacaataaaaaaggaga

SEQ ID NO: 967 - DNA, 921 bp, Homo sapiens
tattgatatggttatctctgttcctgagtttatatatggggacatcagctctcggatggctgtatatgacaagtgcagtgaaaaccccgggtaccatgtggcattgctgaaaatctagacttaaagtgattggctgttggcttccattctacatgcagcccccaagagggtaggctaaagttcttattttctggagtgttggggggatatatggcaggtggacaggcggatggggtggctagggagaagatggggaatggggaggctgaggatgagtcagggcaactaaacaggctgcccattcctggaactgctgctttcttggaaatttgcaagcccccaaatcctcttgattttagacagataagacagcagacagcaggtggtgccaaactgcagctagggcatcgtgatttaaagcgtgcggtccacgtctggactctgtggtctggctgcacagacttcccttggtgttggagcaggttttcaccatacttcactaaatttattttttcttttgcttcttatttcacgttattttcttgatataaatctgtcctccttttccttcatgatgtttttgtttttgatgaaacaagccatcaccattccccaaatacataattaaaaaaatttaaagtctgtaaaagtttattttcttttatttctgcaacttctgtagaatttattttggtgtgtgtgatataactattcaacaccctccttagcctcatccccatcccggctcctaccccttagttaactagttatttcagcagcctttattgaataatctacttgtccacaactgatttgaaaatgtcattcttatatactgatggccctttttctggggtgttcatgcctgtgtcagtggcacattgttctaattgctgtaaagaatacttttttttttttaac

SEQ ID NO: 968 - DNA, 692 bp, Homo sapiens
caagtcagcgaaacaaaaggacaaagattgatgtagttgatttgcaacaggcaaaaagtttatcgacacagaatgattaagaaggaaaacacattttgcaatttaaagacaaaaccgaaccaataagacaaaagaatctgagaaaggattacaggagtagctgcagctctgtggccgcaggtttgttgcagtgcttcagcacgcctttgttaggtgtcatcatttacatcctggggacaggactcagctgcctgcatcttactcttgaattttacatcagaaacagtgttgagatgaaattagttggtcattatccgtcaccagcctggttcctctgcttttatgtgaatctaaaacagaaatagggagaattttagaactggaaatgtaaaggttggttcacaagtcatgctttaaagtgaatgactgtagcccagatttttgggggtaaggaaagcacattttattcatgatggatgctcattaaataagcagaaagtattactttaaaaagcgactcttcccctcgattgagctgtgttggttattcctttggagtccacagagaatcatcctttagattcagcttctctggcctcagaactgttgacaaataaaagaaatgattgttgtcagttacttctctttggccaaaaactgtaaagaagcagacatattttctttctgaatgg

SEQ ID NO: 969 - DNA, 751 bp, Homo sapiens
tgactgcaattatctaggagatacaaaaaaaactaatgaacactttaaggaataacatgtaatttcttatttacattcaattatcaagatatagatgcagaaaaattttaaaggaactaacgcccagtgtcaattacattctaaataaatctagagtgataccatggaaagttgttttttttttcttttctattttctactagcttttcagattgtacttgatttgaaacttgctaaaactgtaaatctcagtctctgaataaaaaacaatttcttcatttttaagaaagtgattttaacaacaaaatcatggtatcggtgactcaccctccctctccaccgagcaggcggtggtaggtctcgatctccacctccaggcgtgtcttgatgtcctgcagttgtgcatactctgtgttctggtattcagtctcgccccggatctggcagatctgctcctccaggatgctgatatacatcttaatttctgacagctgagccacgtagccagcttctgtgtcagccagggttccttctggggagctttgctacaaatgcccatgaaaattgaagcattgtcagaataactgctcagtattcaacatatgaaccctgaaacatatattttgtatggtgagggtgtctccaaatgaaccacttaatagagatttacctttgataattaataccgaataatagtaatgatagcaaatattaatcagagagtactactgtaaccatatagcaattccta

SEQ ID NO: 970 - DNA, 933 bp, Homo sapiens
agccaacattttgctagcttgcttcaaacagtgtctgcaaaacaattttttaaaactatagaagaaaattgagtgagtgcccctttcccacctaccatggccaagacagactgcagttcatgctggagggactggaggacttgtttcagctccattatctcactcttggccgagctaactgcttcagcatccgtggagatctgtgtctgcaaggatgcactctgcaagcatgaaatcaacaaagtacagtgaaatcaaagaagctccaagcactctgcctggctttctatcttctctcactttgccaggttagggttcatgttaggattagggttgagctacctgcttgttgaaccactcctcggcctccctaaggttttgctcagccagttcctcttactgttttgcctcatgcagttcagccgcttggttagatctgcccctggggccgagttcatttctacagtcacgtccccactggactgtctcggcaaagtactcatttcttggcggagaagaaacgcaaaagtcacagtagcaaaaatcctttgaggttggggaccttgctgaatggtgatggtgatgggaagtcccttgatggatttatttctcctatctccttggggttgttctggagatatgccaggtcttctgctaggctttcggactgtattttaaggtgccatgtggtcacattcagctcactgagtactttttgcagatcatttacataggtttcaactgactggcattagatagagctcgttttcataccttaggagatctttggaatatgatgtatgaattagattaactactttgagaagctttattttaaaaaggacttgtccactgacatccagctcaagttgaaattcttttgaaatatttaaacaaagactatgaaatcatttttatttcttaattaattaa

SEQ ID NO: 971 - DNA, 2215 bp, Homo sapiens
tgaaatcatttttaaaaattccaattttggaatctcttgtcattaaatatacattaaaattggccttttttccttcagtgtagatattttacactaatatattacatttatctgatacttggatctaattgcctttatatacattttatgttaaaagtaaaaacataagtcttattttttgtcatggtaacaactgatattttgaaacaaactcacttcattttgaagtcatctgctgcaagtccagcactgtcaattggggaagtcatgctggcattattaatcgtggctgcaatgatctaggagatgcaataaaactcatgaacattttaatgagtaacatgtcattactgatttacctttgactgtcaagatatagttgcagaaaatttttttagtaactaatgtccgtgtgaattacattctaaataaatctagagtgacatcatggaaagttttttgtttcttttctctctctctctctctttttaccaaatatatatctgaaacattctgcatggaacaattgagcaaaaaataaaagaacaatttcacattgtcttcaaatttaataaataagtacaaaagaggtaccatcattgagtttctcacctggtccctgagatcttcaattattggatagtatttgctgcaatctcttctagatccaccgtctccagacccaggcccaaatttgtcacactactccttgattttgtgttggcctcttctagggctctgacattgtctaggtaattggctaggccgtcattgaggttctgcatggtttgcttttcccctccagagaaaagccccccgttgccaccaccacctcccatgccaccaccatactgcagaagcctccactagcaccaccgcctaatccagaacttccacagaatccagagatcctgccgaagctagaaccacctcctacagagcatttatcaaagcccccactaaagctacctccaaagccactgctagacatccccactcaggccatagctgtcggctcctctttggaagccccgggcagagccgccccccagaccacatctgcctctactgctgaagctgcttccaccagcagacagcctggccaagctgctgcctccagccctggaggaggagacacaggaagagcaagacatgatgctcctgcaaacgttgagcttatctaggtgtgagagatggaagtgaaaagcacaccgatttgaactccttggtctttatgtacacaggttttagggcattcattttcatttggctctgtccttgtttcacgtttccaacctattctgagttaatttattttgagttaacccctccccgttgggccaaataatatttgaaaaattgggtaaacatggagtaagattagatttgttattatttcattagaattcattagtgctgtacaatccattacttcctggctatcattttttcaccttcctagacctttgtagttggcaaatcatacatttctctaggtccattaaactcatgcatttttcctttgtgattctgggaagattattaaaccagattccagtgttagtcacaattcaaatactcagaagtgatttgtcaggaaatatttctttcttttttaacccagtaataatgatgagtagcttcatattcccttaacaatttttgggaacaaattgagcattgtaactattcttgcagaaagaaagcctgactttgctaatttatgaggattagcttggagagcacacttcgttgataagggtggggttgttagtaaagtgtcatgggattcttctgtgcaagacttttgagcaataataatgtttctttttagcctcctgattcagcagccaaaggaattgttcctcttacttaaatccattagttttggcctactcctaaggattttaaaaacattattcagatttcatagccatagttttcattaaaaaaattcaaagataagagcccactttcctcattaattatggatgtctacaatattttattttactctgaagaggtaagcctataatatttacctctgtcagctacataggtgaaaaggtgatttcaatgttttaaatggaatactatagaaaattgaatttattgaggtggataacaagtgcctacactatgcgtgtcttgggttttcctgcatattactgatggaaggacccaacaaccctgtgtggtaggcacatcttctctc

SEQ ID NO: 972 - DNA, 1169 bp, Homo sapiens
catggcataggattatcacatcaaatggagagcgcagagcactctgtaaattgtaattccatattcaagcataaggtttgatcatttttattgctgttttcttgcatttgtactgtattagttattccataagaccatatgtttctaaaccgggaggtcagcctaacttcatctattgaaaggtccgtcatagtcctcaccatttttctatgtacatttggtgttccatttgatgtcttttctaaggggcttatctttgaaatttttatatataattatttacaaaaaaagatgtagaccctatctatggattctttctgatttaagtttgaggttgtattcagctgctctcacataccttagctattagggattgtagctcagtgtcatgggtgtgaagaatacgtttttcagtttcatgatctcatatcttgctgcttcagtggagaactgagctggccatgacttactctgagctataacatcttggcaaaacagagctctgaaatatacccctattttatttatacttatatatttgactagctactctattaattgaattgttctttagcttcttaatagttttgcttgacaaaaatgttgcgttacgtttatcaacattcaaatattaagaccggtcggcagctggggcagcattccttacagtaattatatgactactagactattccgcaatctcattgcctaatcaaaaggaacagaaaagattacattaaaacaggaaaaatctatacttctattttctctgattttttttttttcctaaaacaaaccctgaagaaaatgattgttttggaggagaggtggaaaagcattgaggcgtgattcccttctgtggtgagtcactttcttcagtttggtttcatattcatttccaggccagcagttgtgaaagttttcagggcattgcctgtgtcgttgacctccattttgcactctacataaacccagttttgatgctggtgttttggaaaagtggttaaaattgtttcaaataaaaatattttcccaaatgttttctattaaattacgtgtattttttttccccctgatatcaagtccagtaacttcaggcaaatttagtgaaattctctaccatctagaaagggatgaagaacttaaaggaaggcagatgaattccttcc

SEQ ID NO: 973 - DNA, 630 bp, Homo sapiens
gcaggggggtgggggtggggcagtggggagaaacccttcatgtataatttttgttgtattttatataatcacagcaagtcttctcttacatattcttcaccatgttcagtaagtgtccgaaaaataatttgcatttttttttcgcctgctgagaaacagtagggagatattattaattgtccaagtgttgacctagaggaagactctgggctgcagatggctgatttatcatcttcccttgttggcaaatagctgccctagttacagacccagtttccatgtttcttggtaccagaagctcactttgccatcccactacctacttccagtccaccttctgccacagacttgcaaccatgtcctgctgcccagtagaacccagattctctccccagtttgctgaagttttgtgctgctgctttgctgctaaaaccaaaaccccatctgtcatctgctgctaaaaagttgtgccatctccataaggtccaatcacccaaattcctttccaccaccaaaccgtcgagaccagtgtaggagacgctgtaggggagcacgtctatgtctctgccattgactgctccagtgttctagagtgttaacatcataagtggggcacctattccatcttaa

SEQ ID NO: 974 - DNA, 517 bp, Homo sapiens
gcccctcctaacaattacatctaataaagaggttgaagagtgtaggtttttttgcttgactcatcaattcttcaattagtggataatacttgttgtaatttttggctggaccaaatccctgctgactttgttgagtgagcagcttgtttaatactgtaccctggtaactgagggtttcccagaccatctgttcttcatgtgggaaaagcccactgttgtagaagttggcctttacatctcgacactacctaaactgcaggtctgttcatcatcatggaaagctacaccacctacaccgctatccctaatctgcctcaagtgccacttttcaaaaatatgtcctaatgatttatcagattaaacacgtttggctcctttaaataagacatcattttcttgtctaacctcttctgctatcgatgcttttgcatttccacatcacttttgcagttttcagctacatttgtatgtgtcattgtaagtgaatacttactagagctgtgagaggcaatgaggg

SEQ ID NO: 975 - DNA, 773 bp, Homo sapiens
aagtcccctgaggtacagggcttatggttgccaccttcgctgatagtctctgagggtgtgtcactgaccatccatttaccttgaggaggtgctaggctgaaaggtgtacacgcctgcagagatgaagtttatgggtaaaaaacatggttctcccagtttttatgattccttacacatgaaattcagtgttcctccataagttctgtccctttgtagtgatttaaaaattatcaccacatattttatgtttcataatattttattttttgggggaaagaaagaacatctttgtgtatatttgtgttttaactgtgacacaggcagatacagtaatgcggttttataacattaaaattttaatcctttttaatgagtaatattttcttaccttttactctaatttcaccaactttgctttcagatcttccttgtgagacaagtttggtgaacattataattaaacaaaacttcccatgaaatctaccaattttcctatgattctgagaatcatacttgtttcaataaccgagaggcattctgtctttgtcttggtgaattctccttagtgaagtgaatatattttattttctcttcattggcattaaccagtggcataaaattaaacatttttggtttgcgttgcagaaaagacgtgacatctgatagtttgttgctatgcctgcccataagttttgaaatcattttctataaaattgctttttgtggaataactttcaaggggttgagttttttgaaatccttgccaaattcct

SEQ ID NO: 976 - DNA, 637 bp, Homo sapiens
cttttactttttgtctgtatattaaaatcctaaactaatatataaacgtaaagtataatcactattaaattaattgccagtgtttgttttcttaagttctgtctctagacgttaagaaaaatctatattgtaggtgaagaggaagggaagagtgggttttatgtcttggaagataaatttttatgttagatttaaggcagtacccatttgtaattttgtcttgcatttctgggtctagaaacttaattgtggcaatagattgaaaatactactttctgatatgtttgaaacatgcctatttgcattgcttgaatttcccacttttgctttaatcacctggaaaatggtttcagtgaatgtaagtttttcttaagcttgccctgattcaattatttctcacacaaaaacttcatccctcttctatagtcaaagattccgaacactgttagatccctctgagcctgagtggagatttaggtactctcaggggtaattgtctttattttctgctgaggtgacttctgtagaaagatctcaagtcttttctgcaattaggctttgcatacatgcatgtgccgaagattggcaggaactcagcagatgctaaatattaaagacggtctctaacagagaactc

SEQ ID NO: 977 - DNA, 742 bp, Homo sapiens
aacatacccctatagaatggagctcagaaaaagtagaagggtgtttcttttctccctttttggatagaaacttccaagtaattgtagcatatcatgagacttgagagtatcagtggcctagtgcagagcattaaattatagtggaaaagactggtagccagaggttttgtatgtagttttttataggtggcaactaaataactagaaaaattaaattagtgcatcaatgttaagaagacttcatggatccctgtaaactggtggagagtgaggacttctggttatgtttcagttactaaatcctctaggtaatttacaaattatagccatgctctcttaggtatataaatatacctctttccatattaagcagaatgccctcaagaaccaatgtggttacatttttcttccctttttggaaagctttcaattacttcctacctttgacactagttcaggcatgttaaccaccttgccacatagaacctcccatctgagcaggaaggtttaggctgcaatgagtgccgtgttcctgcaggtataagtatcacagaggacaggattaggaacagtgctctctgtatgttctttgtagacttgccattttggcaacacagtcattggaactaggtcattttctcctgaatatttttgttttaattggctaatttattcaactcattgtctgagtcttatggtaaagtagggagaattgtcattcacctttaagaggattgataag

SEQ ID NO: 978 - DNA, 578 bp, Homo sapiens
cttcagtgttgccttctctgacaagtaagggactacattttctttagcttgatatattcctttgatgcattaataaaatgaattagaggaaaaggtccaagccatggtgctctgacctgctcactgaggctggaaccactcagctgtagtctgaatcctcataggactaccgctcctgatcacattctcatgccctggaaattgatcacctggaattgtggaaatagttctatgtacaaccactaggccattcctgaggctacaaatggtttctgaaatattttctaagacgtgaataagaaaaaagcaagggaaaatgaataaaaccaggtgtgatatccaaaatagttaacaattatatggcatggacatggatgagtcagaatgaatactagcagctggtaagtctggactggggtcctggacccccccccctgctgtgcctagcatgtttggttactgatggtgtacagggggtcatgggcaagccctgcggccatcgttgaggccattcagagggcctctgggcagtggctacttatcagccctatgagctattttggtattttattatatta

SEQ ID NO: 979 - DNA, 942 bp, Homo sapiens
gattcccctagattcacactcccataggattgaagtgggcactgtattgatatctgttgaccaaactaatggataacagacatcagtcatcctttgctcaaactgatgtatccacatttttctacaaagattaaaggagaaatggaaccgagttggaattatttcacacaaaaactatgaatacacagtttttagttaatatttgtaagcattctccaaggggcagagtgataggtgttttaaaagaacaaatcagaaatgtttgcagaataaaggtggtgactatgaaatatcaatttcaatgctatcttccaccttctcttagattatccctaactgaatatacatccaccatttgggcagttttattacctgtgcaggtctatgcggatataactttaagcttaagtaaggacagatgcaatattataagatttggtttccctatgaagtaagactttatctagtaagacattaatgtaaatacctgaaaatctcataattgctatgaaccaagaattagcaatgacagaagccacagtggcagatggaagagaaacagctttgctagggagccatgaagacacactggctacactgtgttagtggaagctctggaaacatctccagaaagttgttttctttctgcaacatagtaattattctatttcaaaaatcactttccaaatgaagtagttctattactgaataagagtcttatttttgagaacattcttgattattgttattaaatggatgggaacagtggcacagaacccaaggggcataaaaccaacaaagtgttttctatttggcggggaatgtcttttatgcacacatttgttggggctgcattgtttgctctgggaactcaagacaaacaatgcaaacaaagtctcctgacttaccttaactctcctccctcctgggttcctccgaccc

SEQ ID NO: 980 - DNA, 527 bp, Homo sapiens
taaccctattttctaattcatgtctatctgcatcctcatccactgctcaatgtgttcctgacctcgggtcttcattgtctgcagagttcttctttctgatcgactttcaaggtatcagtggttacctctctcctatgcaatccaaaacctcccctcctgctccaattctttctcttagaaaattgattgattgttctcaccttcgtgcttgtgttctaagctaaactcgccacctttccattccactgaatcccttttcagtttgctgcatctctcaatagcatcgttattttctagtcattagtcactttctttacttaaaatattggtattatttttgtcatctgcttaaaaatttttcattgtataatttcctgcatacaaaaaatttagaaattgtgtagtttaaataataaataatagtaaaacatacctgtatcttagagaccctgctgtttctccccagtgatatctcccctattactgctcaggtgtcatcactatcctgagttttctttattacttgc

SEQ ID NO: 981 - DNA, 789 bp, Homo sapiens
aattaatgcttttaaaaagattttaagaggattttatccagcatttttagttgcttccagtaggagaaccagttgaaaccaagtctcctgtatcatctcttgattctcctttttacccctgtgactgttcctgttgattgttcttcatagattttcattcctctacctattgcttaactgttgatattcccattttagaacatgaccccacttcttttttattttacatatgtacatttatcacattcattctctttaatataatttttccttcagtaaaacttaccgactctctactctctaatggagataactggtagttcatcccatatgaagactggcttctggtgagacatcccaggcccctcaccttggaggacacaggaacacagggctttagccttcccagcgagcctattatgttccctttctcttcagggacctgtccatgtctctctacttttctcctctgccattggagaaatacgaaaggtcactcaggggcctagagtctcttcattcaggccaagactttcactcttcaaaaactcataattggaacaatcactggggaccaagttggtgcaaggcacaggctttgctgtatgatgagaagctggtcaaggatgtgtagcgtaagctctccttcttttaaaagcttacagactagttagggagagggagacacctgactcatcacagctgtgaccttttatagttttaattaccaactttagtcttacatgtttccaatataaaatacttcttctggttttgatgtgtatattt

SEQ ID NO: 982 - DNA, 587 bp, Homo sapiens
atgagggaggatttgatgataggcggggaaaagtggtgtaaattgcttcagcacttagacaattacaagattttttttctaagtggaatttttctctgagattgtaatatttttgtttcacataatctaatggggaacataattaggcctgtggctaagattgtatcagaagcaggcaataaaaacaattcagggataattacaacacacttaaaagactctttttctgctttatattttcacttagaggcagaaaccattttttttgaatagattataatatggataatccatccatacaggatagagggtcaactaaatatctagaggtaatatctgatctgaggaaattatgtttttaattaatctaatttatttccctttagtagagagaaatctattggtcaagagagttataaacatcagctacaactttgtagtagaagtggatggctctattcctgtaacttggattctaaactaaaacttttgctataacctctattacatttggaatattgtttaaaatatatatccaaaaggaaaatgaggttgagaattaatcattataaatattgagtattaaa

SEQ ID NO: 983 - DNA, 935 bp, Homo sapiens
aatgtatatactttagttattactaaagggaataggcttcttagtatgtcaaaatatggcagattggggatttaaataaaagtacttttattctttctgaatttgtttcagtttgaattatagggtaagccttatgaaaacctatgaggaaatctattattttgaaagagtttttatataataaaagctgttagatgttcacatatttatattgcacacataaacattctaaagacagtatcaccaatgataacttgctaaagaagaggtttattgaatacaaagaattgacaacagatttctgtaggataatcaaatgagtcatatttgtgtgtggcattcttctagatgaatggggagatgctgtcattgattgcccagaaagaaagtaacagaaagacaacaggttagacatttttcttagacatgcacatttttctggacagatacataatgccttttcttcgcaggggctatgtggcatacgttctctgttgcatctcaaattaattgctttgagatttctcttccagggagtggagcctggtggtaagtattttgctgcgttggtctacctcctcaagaactttcttaaccactatggctttggctgggtctgagcattaaaaattaaaaggagattttatgtagttaaaaaaagaataaaaattatatcatttaaaggaataataggatttgcatacagaatgaactttgcactaagcacaaatacttagactcatttttggtgaataattttgattatttggttagaaaaaacatggtgacatgttattttgtttaaaattagcacaaatcactaatattagacatctagcacatatggatatctactacaaatctttattgtatgtattcttaccaagccatggtaatataagaacaatcaagctatgcattaaaaatgaagtagt

SEQ ID NO: 984 - DNA, 1413 bp, Homo sapiens
attcaggaagcttcctgctcctaacaaccctgagctctagacatccagacttgtggccatgggactttatcagtgctatgaagacaggattctgtgagtgctgagctccagaaaccatttccagagtcagaatcctggtccacatattgaaactccatttagcctcccgtttgttcttttcactctagaagtgatattttcaatgttcatatcttgaactcggtgcctgctgcatattggtttaagatattaatttgtattttggcagttgagtatgtattatatttaatatttagtattcatgataataaatgcatgcagccaaattatgtccgctttccagtggaaagtgggatctaagttgcaagcagatttcagtatattacgccatctatgcagattattttacctacccatcatctcctcctataaggagacagtaggtctcaatttctttttccaggtggagcttgatgtccaggagctgctcatactccagcttctggccctcggtctcggttctgacctggtgcagctgctcctccagggccccgatctgagcctggatctgcgccagctgcgcacagtagttgctctcggtctctgtcaaggagcactccagggagtgtttctgtcaggaagcaataaagagaacttgaaatggatatgcagatatgcagggatttctttgatacatgattttctcctgctgttaactttacatataattgtttcagatttcacatggacacatagttaagactctgtgatactgcttgaaaatgagcaaatccttctttttagtagaataaacctaaagacattcgtgtagttttaggtgtcagctatacaatcctattctttccttatgttttgagacaattataaacaaatatatttcaatattgttaaggtttttaaaaccagctggcaagtatctaacatgatgacctgggagatggtgaaaaaaaattgttcttttcataccgtggctaggagagactgaagttcaatttccagggtttgaagagtgcgcttcatttcagtcagctcattccgggctgaggttgtggctccgacatcctcagagatctgctgctgcagggaggcgctctgaaatgacataagtgaaggagcaaatcttagttttgtgaataccagtaacatgcaaagggaccgttttctggaggagagtcaccttctcgttgaaccaggcctccgcgtccctgcggttctgctctgcaagggcttcgtactcagctcgcatgttgttcagcagaactgtgaggtccaccccgggggctgcgttcatctccacgttcacgttgcctccagctgcgcactgcagaacttgcatttcctagaggcagaaaagtgttctgctcagctctgcaggaatctcatggaaagtct

SEQ ID NO: 985 - DNA, 861 bp, Homo sapiens
aaaaaaaaaagacagctcagccctcatgtctgtctgacaatgtgtcttcagcaccaactttttatatgagaggttatgtacattatctcctgtcaggtgcacagtgtctgcggagggatagcaaaatgtagacgaccagctcttacctctttatggttctttttgaggtaagtcatctcctcactcagggtttcatactgaatctccagatctgttctgcacagggttatttcatccaaaactcttcgtaacccattgacatcagcctctacactctggtgaagagccagctcattttcataccttaaagagtgttaatgatttcctaatttgtcacatggttggagacatagtcactagtcactgatcaatgacaaatgctagcattctggaattttgaagatttggccacaagaggcattttcaaagcttgttgtataataattattgtttctactttgcagtatttgacagaaaaagaactagggtattgggcgctagttttaatagcagttcatgctttgtatttaatagtcaaagcataaaaaagtaataacatcctgtttatgtgaaattcaagtgttttataattttggaataagagttgctaaatttgatgtaatgcgttgcatgaattgccatgaattcatttcactctggcagtctacttacttgagtctgaaatcatcagctgtaagcctggcattatcgatctgcagaacagcattagcattgctggtggtggatgcgatgatctagaaatgggaatttgacttttatcatgaagtaaaccaactgaatctacttaatgcttatttctaatgctaaattggaattctctttaagaaatcacaagtagga

SEQ ID NO: 986 - DNA, 1408 bp, Homo sapiens
tcacaagtaggaatgataaatgtttttagaatttaataaagaaaggaaaacaaaatttagaaataaaggtacatgaaaatgattgtgcagtatgatttcttacctgatttttaaggtcatcaattattgggaaatatctgctatagtcatgatcaagaccacggcaagagccaggcccaaatttctcataccagcccttgatcttctgctccaggtcagcgttggcctcctccagagcatgcacactgtccaggtaggatgccaggcggtcattgaggttctgcatggtcaccttctcattgccagaaaggagcccccgctcattcacagtgaagccagcacagggattacctccccctgtgtttcctcccgatgagctgcctccgaaggcactagagaagccacttccaatccctgaaatgccacaagaatttccagtaccaaagctggttcccccaccatagagtctgagtgatccagtggtgggacgaggacaggacctcctggatgcactggaaagtcgaagagacatggtatcagggcaaacgcgttgcagagctgtatttgtgaaagccagaatggagtgccttcttgtctaaaaggtttggtttgcctttttataggcaagtcccaagtgtgttctgaatgaaattctgcctacacagagtaaaacatggcttgccagtctcagcaagttggcataattgggtgattttttctaattagtaactcactttgctgggctcattcctgtaggagggcagttgccctcaggttggtggttatctgagaaatgggtctgggtggagcaatgtcaggttcattattacgtttttaaatgctgagtgagtcattcttcacttccatccttggaagtaaacctcatcagctcattacaggatagaaatttagcatcatggttttgggctattatgccaaggcagattgtgatgtttctgaggctttttctgcttttattttcacaagtttttccacataagtagagaatagaactgtaatcatttccccaacctggttcttcaaccaataggtttttgtttttatttttaaattcctcttgccactctttcccatgggaagttaacttccattctggctgacatgagcatcatattctgttgacacttatgactgaggagagttgtcttaccttatccattttggtaattaggagcacacccctaattggtgttatgttttgtgggagtttggaaagacattaacttatttcctgaccctgcaaaatctgaagcaaacctggtaggaactattttttctgtcttaatttattgtggtttagctcagatgaaagtcatcagtaaggtatttagtcggtgggaattcacatatatttactgaaaactctacctattatggaaatataaaa

SEQ ID NO: 987 - DNA, 397 bp, Homo sapiens
atttacaacatagcataacctagatataaaccagattgtaccaacccatggatcagcaggctgtcacttcttgtttcaacgttttgcactatctaatatattgcagaagacagtatctcaagtccacttctgaataacccacacttgaatccaacctttcctgtttgccaccttatggtctcaattctcagcaccaaaactggccctttcctgctagtcaccatttcccatatcataactgccccaggtagttgcagccctctgcttcatcaagtgttcaaagatgtcttgcttcagtttcccccacagcacctcatatatcaggcttaccaaaagttttagcatattattagagtattgttatagaaaaaaataaaacattaaaactgtttaccaa

SEQ ID NO: 988 - DNA, 282 bp, Homo sapiens
aaaaacatcttttaaagtatgtttttttctgtgtcattccaccatggatttaagcatcttaaggtaacatctaattaataacttcctaaaggcttaattaataaacagatgtaaacatcttaagacataactaataaataattatgtaactctaatttatataacttcatatcctccaaacagagacacattttctttttatgtggccaagaaatatttacaaggcatgatgaatataatagtccatataaaataatcaggctgggcattttggctcacgcc

SEQ ID NO: 989 - DNA, 540 bp, Homo sapiens
gaccagattagaaaaagagatctgtgcctgatacgtgtctgatacaacctcactgtattttctgaaatctataaaatatgtgtttacctcctcaaaaaaaaatcagttaaaaaatcaatattacagaaggatctcttttggtggttttcatggattctaaattcagcatgtatgccaaaatttaaaacagtaaaagttagccttggaaatccttagcaatttttgggacccaaactggtcattttttccactggtattggaacagattatgtttctttggaccagcactacatttaatagttggcttgcatttaggtaaccttctgtttggaaaatctacaacattaaacattgagctcatattcatcgatctgagtccccaggatgcttagaggaactgaagacgagtagatattttaatcccttatctcaggctcaccccagaatggactggtagggagatcgagcatattatttgtctttatcccttatttttccatgtctaattatgtggttataaatgtagtacatgttatacag

SEQ ID NO: 990 - DNA, 228 bp, Homo sapiens
agtatttttatttgaaaaccctacatggggcatctcaaagtctggatggggttgcaggaagcaggtgggggaagcaaggtagttgccagaagtgccagaaacacaaggggtcattggcagaatttgagtccagtgctgggcagtaacaaaggccaggtcgtggaatcctgttctcaattccaaggagtgaactgaggaccagagtgaaagttgaagtcttgaatcaag

SEQ ID NO: 991 - DNA, 453 bp, Homo sapiens
tgtctgatagaagttgcagctagaactgattggtggctgttggccatctgagttttcatagaactgctcaccatggagccagtctgcagccaacacatccaacagaaaccacagtgtgcccagcatcctggtgcaatgacagaatctaatcaagcaggactcacctgtccacactgaagagtatctatagcagtataatcaccacaattccaatgtggagattttcaaataccaaccaaataaattgagcaaagaattagcagagctggttctgtttatggcacagattgttcactgctacccggagcatccaagtaactttcctcaagagtgcaaagatcttctctcctaccatagccctatcttgggtccagattttctaatgacattttgcaaaactttgatcttgctaagaagaatctcactaatcttggtgacacacagcctccctgc

SEQ ID NO: 992 - DNA, 1327 bp, Homo sapiens
ttctttgtttattgtatcactatttcttcatttagaaactatactgtaagcagtgtgaatttttgacagcattaagtttgacattcacacaaagacatacccggtggccataatgatattcattatcatggaaagatgtctaaaatatactattggtgaaaaaatcaggtatcaaacagcatttatggactaatcccactgaaatcatagagttcattctttccttattttttgcatttttgcagtgcacatgtgttatcacttctctgccttttggctaagatcaagtgcggtgcacatgtgttatatttataatcataaaaatcagtaaagctatttccatcttaaagaaaaagatccctcactttgcaataatgagtggttatgcctcccggccttgtcttctttaactactagacaagattcatgccttggaattcctctgaacttccctactacactacattacaaggaaggcaatgtgggtatctccctcctccgtgacaacttaagagatgcaaggtcagggcacaggtcacaacagagagggacactgatggccaattctggggcctctcatcagttgtcccattccaggtttttaggtagagggctgctttgctgcttcaaggttaagcttgcctaatactcctctaggagctttaacgagctaagcacaaatcactccactgaactcaccaaatgctatgcctccctcagccttgcagactttcccaatccactgacatcactctactaagccagtccatcccatcccccctgttctgggagaatcctacataagctttcttcaagtggtctctaaaaccatttttggcctcactttattagaggagaaggaggcgcttgctgatatcagtatttcttaccaactctgtttccatcacagtaagtatcaggtatgctaaaagcatgtgtttgcctggaaaaaagttccttttacttagctgctctagggtatctctatgattttgttctgcaaccttaaggatgatataactaaaaagtaggagtatagaacatccccaggtttaacataagctgcattaattattataaccttccctcctcccagccaaataaaaaatcagactcagaaaccccactgatcttatgcatgttggtactcccacatagtttacttttaatacatgtctattagatatcattatataaagttaacattgcagggaagcttaaatgtgtcatttgtacaccatggttggatcttgatatgctggatattttttaaaaaggctctactacaaccaaagttagatccaaatccataaacaggtagataaca

SEQ ID NO: 993 - DNA, 571 bp, Homo sapiens
ttgcattctacacagagcacttaagttcataattctgtgagagaagtatttatataagactaaaaaaattatagtaatcaggagaaaagaaaaaagtggaaaatttgtttgcctcaaaattgccaaccctgggcatatttcataaagcttctacaaaaaatggtttacgaagctgaaaataaatgtgactgaatcctagattataaaaattaggcaaatctcagtctttggaattatctattatgtgctttttcacactgactctgggacagtctgaagttggtagtgtctgttaagctcctctagcttgccaatccaggtgcctggtaccttcccagaactgcctttttcatgtgaccctgatattcattcctttcccagtgctcttcctgggtaacctgaaaaatagccccaggatagtgaaaagtagtcttctttctcatccagagattaagtgcattttaagcatggtcatcttctaaaggaatgaatcatcctaatcaggaaaatctgaggcaccagaacaagtagttatattttgctcggaaatgcttttagggatactgaatga

SEQ ID NO: 994 - DNA, 355 bp, Homo sapiens
aaaaggaaatgcctttaggtgctcctttatattgttgtgagttttgttcccatgagacaggctctatagtatctggctcttttcctaagcactgcaagaaagctaaacacaggtcactctgccaggcctaccaaagtatgtcctcagtcttccctaccgcaacatcactccctaccaagatagcccaccccaccatctcacactgggaagattctgtttaagttttcttgaatctttagaaacaattttggcctctctgctgggggaaggagtagagaatgctgttatctggggactgatacttccgtttgttcagaggaatagctcagtggactaccattcttggtaatggtat

SEQ ID NO: 995 - DNA, 435 bp, Homo sapiens
ttagctgaaaagatataatttgaatacaattttagtgtaaagtcttgagtatttacgcgtttataggtatataaaaggaagcacagatttctgaagcctgtgtctccaaccaaaggcaaggatgggacctctaaaagcagaaatcacacattttcacaaggaaaaatgattgcttggtttaaacaaccccttggattgtcagctcaaagttggttggttacagtagagtttggcacagctgactgttatgccccaagtcagtttgttgaatccagatagtagaggcacaaatttatcatcaggcagctttcctactgactctgatgagctttctgaaaagtggttactttggttccatcttctggagctctgggttatacagtgtgcaaatctgaatgcacatactcaaagttcagcaaaaatttattttattct

SEQ ID NO: 996 - DNA, 1099 bp, Homo sapiens
agatacacaatattaaagggctatcttgtattatgctgtaacacagtgatttattaagtcttcattaatccctctcagcagttatatactggatatatactggatataatgtactgaattaaaaatgtgacattcttttatcctctagcagtgaagcagtaaaatattggtcagaatgagaatcatgggtaggtctaatcatgcaggaacaggagattctaaataagttgccaaagaaattcatttcgcattagattatcttcttttctaggcgaatgttatttaggagctgtgtttacataccaaataatccctgaattcaaggctgttgtgtgattactgaacatgttaaagagcttacttccttgcactgcctccctacaagatccatgtcaagtcctgtctaactacctgtacaaaacttgaggaggaaagtgggctttcagcaagcacactcttgggataaaagtagaaaataaaggccagaaatcatggccgtttcctccagagaaaataccagaacatatttaaactcaggggtggtatgctgtttctggggaatgtgccctgaggctattttgatacacgaattaggagtatctttagtgataatttcaacatactacatatgttctttataatttggaaaagttacggggagagtggagaaaacaggaagggattgttagcctagaaaaaaggttgaaggagtgaggggggatctaggggccacacagatagaccaagccagtttcatgagcttacctggggccaggttgaaatggttcatttgaaccacatctctgcctcaggttttctgtaaatttcattcattattgcaactggcttgccatcacctaattcaattcttcttcaatgaatctggcagtgtacttcttagaaacaacatgaatgatggcttaaaccagttttatgtcaaatatcccttcctggtttagttcatgttttgggggctctttttaacataagcagcaatatataccttttaagatatttagaagctttatagtccagtttaaattttggttaactagttatacagtttagattggcaaagcagatacaatgccagcataac

SEQ ID NO: 997 - DNA, 321 bp, Homo sapiens
ggttctagttagattctctgggtccttaatctgtctttctacatttagatttattccctatttggtgaagcatatccatcaagttaaaagtatgttacaatggcagaaacatggtaaggacagcggttgacatggctctctctcataccacactgccccaatcaggactgctgtgcagttgtcatttgaatatcacaacttcaccaccagcatggagagtcttttcctttttctgtgttgaatctcttattttctatattccgtattttcttatttctcagatgactctctcatcttagtacaggcaatgtgattgtgtga

SEQ ID NO: 998 - DNA, 519 bp, Homo sapiens
cctcgaataagtaaagcatctccgttagtggagatcccctaatagccctctgttctgggagacataccgagggatcattttaattaggtagatgtaaggaaacacaggggaaggttgtagctggacatgtgggaattgacaatgaagctcttttcatcattttctttggtacatgaagttcaaaggctgctgggagaaagtcagcaaattttcccaaagactaagcttctgggaaggcagttactgagacccctgatcacttcctttaggagggttaatattgctatatcacctctggactggaatggccctgacctgacgtggcagcagcaaaagacaggagaaattcgccatggagaggggagcctggactgcttacctggacttaacaatcctggcagcaacaacaagtttctagctcagttcctacaaattttactctagcatcacacatgtgtcctaggaaaaaagccctttgtgtttgtaactttggaaccatagattgtcagagcatttaca

SEQ ID NO: 999 - DNA, 261 bp, Homo sapiens
cagagcatttaaattttaatagctccatcctgcgaaaggtcgtgctgtagtagatattctgtgtctcaacagtgacaccttgtggggcagaggtagcagaggctgggggctgtttggactggagtagttttctatctttcttaaagtcagttataagcaggattgatcttttggactctgttcctgaacttaacatggaaggacaaaaacacgtagaaaacatgatgtactgtgtacacctaatcaatttgaatgttgagt

SEQ ID NO: 1000 - DNA, 833 bp, Homo sapiens
tacacagagatactttttttcagccacatctagagagtggggtaactttcagaaattccctcaaaagagctaagaagcttccttctctgttatctctggcaaacctctttttacatctctatagtcagaattgggtcattttttttttttctgtactactggggcttgaggacgggattatgataatgatctaaggcctgagccacattcttatcccttaaggcttaagacaaagaacaaagagggagaggcgaggacacccagggtgagatcaggaggatactaacttcagagaggggtgaatgggtgaaagtatattggaggtagaagaaccacaatgcctaccagacagagcaacttacatcaaaccctttgaacttccaagcttgctcctcacatgtgtgaagaagtctgcataaaccactatattatgttgctgtttgtcaccacctggaacatctggacagagtccccaggataggatacaacttcctttccatggggccagtcacattctttgctgtcttgttccttcattctgcctttaatgagggtggggtcaataaagaaaatggcagtaaatttctctttagtttaatggaaaattcctctggaagttcacccctcattgatgtactccacttccttatttttctcccctattcttaggagccaatatctctgcaacaatgcttccttcttctcacctttcaaagcaagactttattcattctctgaacaacccaccccttccaaatagatcagactatacccctagcggtatatttctcaaaatttggagcctgttctgagtaatatgcttttcaagcgaa

SEQ ID NO: 1001 - DNA, 355 bp, Homo sapiens
accactggagagcaaaattacccatttaataacaagtaagctagaataatactctgggggagactgtgctgggtgagagtagaggagttctcttatattccaagttagggtggagaacgtggggaactttatccaggtttcaccaaaaagtaaaggacaggtgaaggaactcacttctcttgtgagtcatcaatgaacttctttgctctcctgactgtgctgcaggggactgctgaatcaccatctcccaaggacaaatattaattttcatagagtacagcctaaccacaaggtagaagatacatattttcccatctgtccttctgtcctgtaattttacaaggccatctctctc

SEQ ID NO: 1002 - DNA, 311 bp, Homo sapiens
atggccacatctcttataatgaggtatgacaaattattattcagcacagacttaatccacctatcttgcttccaaatgtatcttctttggatcatccctgagtaacactttttaaaattcccttagctactcacagagttggccaaagataagaaattattacttggaaatgtaatcccatagtttcttttttatgatggtggttgctgtgttacttggtacacagatattttgggttagctgatacaaaagtttgatatttcaaactcttatctttattgtggcttttagctacatttttttttctggat

SEQ ID NO: 1003 - DNA, 640 bp, Homo sapiens
atctttatgcatagttttcttctaagaaactcaaatgtgttttatatgaagaaccactaataaccatttacttactactctctgctactaagtcttgaacagagagctaatgtatgcctaagggaaaaccgattaaagaaacgttcttatatagcttcaaaaacgaattaacaacgatagtcagggtgaaaggggaaggtgctcctctttaacttgaagtgcttaaacaaatattggattttagtgaaaacaggagtcttgaaatgtatccttaatgtccagatactcacaagataactttcaattatccagaattattttttactctatagagcaattcttccaaaatagtgcatagatttattctcagaagttatcttattcaagtaaagtgactctcatccaagagagacactggtagcaaagggcagtagttagttaaatagcagtgaaactgatattagagaactgccaactgatggaaatttaatcagcagtatatggaattggaatgggcttatacagggagtaattctgaatataaggtgttcagcagttttcgtttctttaaaattttttgtacaaagtggaaaaaacttacacacccatatttgaaaaatgggtaatttttctttcattc

SEQ ID NO: 1004 - DNA, 793 bp, Homo sapiens
ggagacaaatagttctctatcgcatgttgtaaaaaatccagggcccctgtcccttaccattgccttttttccattccttacatgaagtgtgtcttcccaggtgacacgggagccatccttgatgttttttgtttcatcaagtctatttgggtgttcctattctatgcttcctcccctctagattcccgcctctacctcatactctaggtttatcctgagtgtggagtagggaagtgtgaataccacatttacattttccttttgttcttcaccttttctctcttagactgttccgctcagcaccaaaaggactttctttcttgcactgcaggaacttcccttacatcaaatccttatactgtttactctcatttattgtaaaaatactacagtcttctgaatctgacttctgtaagcctcttttctccttaataacaaagactcctccaaaaatcataagtgcttactttcaggctatcgtctccatgtggacttgaaacacactattttgaaactcaaagctgccttcagcagggttctctccattcgaagaggcaactatttccactggttcaatcagtggggttaatgataggcccagaaccaggaattttcaagaaggaaagtccactgacttaatattctccaaatgtactcgttatgctgagaatacacactaagaacatatggcatttcattacataaatgaaaaacatcatcataagcaagtttggaagcagtgaaacacacccttggaaggcattataaatgctccctaatatctgattctccc

SEQ ID NO: 1005 - DNA, 246 bp, Homo sapiens
ccatcagatagtatcaccttaatcttcctttggtcaatgccacaaaactaaccacatctatgttaactttcttttctccgccatctgcctcaacaaatgtcatgtccctcatctttctgatggctaatcactccctttgtatcctccctcctctggttaccctttctcctcttttcatatactttgcttcttcgttatcttcccaatgggtcagtcctgtcaaccaacctacaagacaccacccat

SEQ ID NO: 1006 - DNA, 1771 bp, Homo sapiens
gttctttctacaaaacagcaaccagagacacaggttcattttcagttaacctactcggagaaaacctactttatcttatttaaattagggtcctccaagcgatcttaacatctcctaagtcccaagcaccctgtttttttcctgatactttttccgtttaccttaaggtctgtgtcaacctgacagtaagctgcacgatggcaggggtcttgcctactaggttccctgtgcacagcagcccgtcaacagtagttgaataaacatcataggtcacaataaccctgggactgcctcttggggaggtagccgcaaactctcgcaggtggcagtgacaccagtacttctccggggggttgttcgagtggaggaatactcttacgtgaaagtgctcagtacaccactgcggcaggaaggaggaagggaagaattccagatggggagaaagtaatattttgcagcacagtacagggtaaactgggtccaggtgggcgtagccgccgcgacaccttcacgtgaccgcggacagcttaaggaccccgcatccagtgcgcctgcgctggagctcccggaagttgccggacccggaacgcaggcggagcgcaagtctgtcagccagtcagtccgccagtccgccagcccagtacctctctctcctcggccctcgtaagctgtccgcggtctgtttggcccgaacggcggcggaggcgctgatcatggcgacattcatctcggtgcagctgaaaaagacctcagaggtggacctggccaagccgctggtgaagttcatccagcagacttacccaagcggcggggaagagcaggcccagtactgccgcgcggcggaggagctcagcaagctgcgccgcgccgcagtcggtcgtccgctggacaagcacgagggcgcgctcgagacgctcctgaggtgggcgcggggctgggagtgggtaggttgtctgccagccgtcgctcgccgctcctcttcccgtctccccccttccttcaatcctgtaacctgggcggagccgccccgtcccggcctgaccaggcgcgtaggtgtggtctgcattctttgctggtgagcaggacccgccctgcaggcccgctgtgactgcccgcttgtcctgcctgcacgtctgctctagcccttggtcggcgagggctccgtggatcagatacctgggagcagcagtctgccctgtactgatctcttttgccacatttacttagaactagtcttcacttttttgggtctctaactgaagcttcccctttcgccccatttttccatcactgtctttcttgggccacattttgatttcataatagtagttgcttgaaggcagtgggggaagtgggggaattgggacactggaccaaatgtctgatcagctcatcacattgtccacatgaaatggaccgtcttcctcagttcaaaataatcaaatgatagatggagaattctgaaagttaggagctacaactatttgaaataaaactctagttacatagttgaaccgttcaaggtaggttgtttaaaagcagtttgttcacaaacagatatatacacagtagagtaaatttgttattttagcaaacgcttatttagctcatgctgatttaatgagggttcctttcatgatacttaatagttataagaacattttttacgattttatagttaaacatttcttttgcataccttgttaatctcgttttctccgtatagtatattctacttgtttcacaggagaatcacaattgtattccaatc

SEQ ID NO: 1007 - DNA, 1309 bp, Homo sapiens
gatcgtcttgcctccgtgatgcttccctcgaaagctttgttcatgtattgagagggatggctgtagtgtaataacaatcgtccgcaacactcagtatcttacagaagggagtgcttttctccttagctctggtggaagtccatgggaggctcctgggtttgtttgcacccatttatgatggtgggaaatgggctaagttaattgcccttatctgagtcatccagccggtttaatttctccttaccccatggatcaaagcaagatgagtccggactggggaagggttggttctccgaaggaaggggtactgaatagattgctcagaggaattaagaccccttggtgtcaaattttagagctacaactgttgggctgcaaggatcattagtctaatagcataagcattttttttaaagttaacctagaaatacttagccattctttagaattaacataattaaacaatttcaaggtaatttttatgtaggcatgaatagcattcagtgaggattttccattagtaatattaagaaaacatagttgtggtataatgagccctgtgataaaaatcttgttgaatatatcaaatttggttccagccctcagatttggggtcttcagaagcacttggtgcatgggttttaagctaacagacatgggaggttggtggataatggtttggatacggttctcctgtcaactttaaaacttaattcatttgttccttcctttattctttttaccagacttaaatgtgtgaactgttcctaggtagtggacctgttgtagatatagtctctttgaaactaaccatgtttctttagtcacctctgtataatcccctcctgccacattaattcaacaaatattaagtattttcactttttgggcttctagaggggttagggtaagcttggagatattactaaagtttataatggaggtaggtacaaaagttttgtaggtatatacgctgtaaaattagatgtgaatcagttgtgtgatgttcattcaaatccggcagaatatcttatttttaataattatgtttggataattgtgtaaacttaacattaattttttaacttaatgaactttttaaactaatgaactttgaaaaacagagtttaaactaattcctaaataattgaagccagcttgataagtcctgatatgcagctccatatattgctccagtgatagacttgttttcttattactaacttgtaggtgttctattaaaatttcctaaaatatacatttatgcatattataataatgagaatgagtacttaaaaactcatttgtt

SEQ ID NO: 1008 - DNA, 265 bp, Homo sapiens
gaagctccagatataccatttaccagcattgtgtaatttcttttgtggtgatcagtttctttagagagaaagcttctagtcttccatgaaaaagtctgcttatcagctttctaaattttatcctggggaatggaggttggggatcttaacaatcatgtatgcagtctatcaggtacatctatttttagtatgacacctgcattagggttaggttcatttctgtgtggtagatcccaaattatctgagttaagattttattttgta

SEQ ID NO: 1009 - DNA, 573 bp, Homo sapiens
tttatacttttttcattaggtatgttgcaaaaatcttccaatctgtttcttgtctctcaactgtgtttattctatcttttgtcacatggaagttctcccaaaagtgttgtcatctcataatctgtagttaacattttttttcttattcctaatgttgtgcatgtgttatgtgtgattttcctccctcagatttgccaaaggtttggagccaccttttctttgtttaaaaccaaggctttttggttggttttctgcccttgtcattcatttttttaaaaaatgttctttgttccttttttctatctttttgtattgattggttagttttccatctttttggtttttctaatatattttaggactgtgtatttttttctcagtctgtattggttgcatcctactgactttttcatttgtaaaatgaagttgatggaatactcttttaatttctgaaatattttctacatggtagtgttttatagatcagtaaagaaaatgttctgttttacttcataactgttgtttggattctcgttgttggtttggtggtgaacatactctttgcagaacttt

SEQ ID NO: 1010 - DNA, 327 bp, Homo sapiens
atattgagataatattagcacaatgacgttgctacaatttgttaaccaaatactaatggagagtctgtgtgaaccatactgtaggagacaatgtggaggatataaagatatacttggtccctggtctcaaggaatatctgtaattggcagacctttttggctccgtaattttattccacataggtgaataaacatatgggaagatttaaaatctgatttgtttttctgtgttttgacttttctggtgtttagtaaatcttatcaggactatcatcattctgtgtatctgtaagaagaatcttctgaggtgctttacacaggagattt

SEQ ID NO: 1011 - DNA, 812 bp, Homo sapiens
acattataccttttaaatatatttgggattttatagttttggttaaaaaaattcgcttatttctaaaatagaatctatgaagacaccaatttttttgcaccattattttccacaatgtgctagtttttgccaactcctggcttagcatactggctttccctgtgcctacttatacaaaacttgcagcctaggtctactttgttagagatacatcctaggctagagtctgctgctatagtaaagtgtacttaaatgttaaagagaagggtgtggtagattctcttgtttctgtggattccctatctagagaactttgatgcttgtgatctgggctgaactatgagggataataccttgtggaattatattgaaggagtagcttatggtagttggatctcctggaacagattttgctcatggtaactgcagttagcaatggctgctttcttttgtaaagcatttgttgatctctctcattttgttggggttttctccatgctgatcagacattgttgatttccagtgattgccctcctgttgtacttttatttcaacttctataatctgtcctaagatagccattttactttgagggtttcatcacatagcttctaatcattcagttacaggatataaatgccctgttccccccatacagctcaggttttgttagttggcctcaaaaactttggggtgaagagaatgggtataaaaattttagtgcattcagtttagccattcttcttttcctcacccatttgcagaggaagtaacctcatttcctactactcccttccttgtttactttatag

SEQ ID NO: 1012 - DNA, 467 bp, Homo sapiens
accactccagtgggttagcattgtgagtgttggagaactagcttagctgtttgcctctgttccattctcccctttgcttctagctcctgtcaccctggccagtggccatgctttattgctgcccagacttactgtggtgctgcctacaccagagtaaatattctgcttggcgttggcttggcactaaatggtataatctcagtctggaaattggtgactcagcaaattatctcacctacggccccctggggcaggtgcccacagtagactctccctgagaattttgatctcattggggtagagtaaaactgaccatgttggtcactcctcctgtctccctatggctcctttccatcagacaggtactttttctttggagaatgtctccaggatggcacctgggcagccgtgtgccacaattttgggatggcccaacctaggcaaaaaaggtacagggcagggcaggg

SEQ ID NO: 1013 - DNA, 239 bp, Homo sapiens
accaaactcatagccatgccagccaaaagcttggtctcagatatgttgcccactcctgctgaaaatttgcccccagaaataatcattacaaaaatacccctgatgaaggggtgggggaagtataagggaaaaaggaaaggaggaaagattagaggccagttagaaagcttggcctgacccttttctcctcctttccctgccagacttgctgactgacagctcaccctgatggggggaag

SEQ ID NO: 1014 - DNA, 1026 bp, Homo sapiens
gcttacccaaaacatttaaaagtcggtaaacctgtttttaattggcagtttaccagagatactaatttgtctaatggatacaaacttatttattttagtaagaaatagtatttttaagaaatattttggttttcagagcagatgttagtttgcttttagccaataacagttgataaatatttttctgtggtggtgggtatgactttttgttcatagtttttcactgcatatattttttaagcttctggtttacgtattaaaaaactttttttcatataaaatagctgctcaaagtaagcatgaataatttttgtatcattttaaaccagttgtaattacataaatgcatgtaatatttagctctggtaattattaattctgctctattttttagatattatgatcagatttgttctattgaacccaaattcccattttctgaaaatcaggtaagtcattaattctgtcttaaaattatatggtaatagcacccatttccttctgccaatatcttcactgtctttagagttttatgagatagtgttataaaaataggagcttttagatctgtctaatgcgaatatatgtgcttctgaagaaagaatctcctggaattctgttcatgtcattcttcagtcacttctggggctcatgtagagcaatggtttgtttttctttggacttcattttatgtcagtaggatctgttgactgattaatctgctgtgtcctttcctttgactttttcagaattaggaaggaaactgcacaattcaggaattattagtctcagtttatgtgctttaaaaattattcgcacaagttacatttgcatgtaaaagttgcaaatgctgttttgattaaatgttaattacatgaatgtcaactattttctccttaaaggctagatgttgaaaatgctgataatttcttatagttttattttggagattggataaagattttaaaattagtgatacttttaaattttaaaatagttataagaaaagtactttaaacattcttg

SEQ ID NO: 1015 - DNA, 624 bp, Homo sapiens
taaccattctcctacttttgtcatcatggaatagtttttaatttcatcttctaggaaacctgtagtacttacttttatttcccttgcttcacttagcttatttgacaaggatctactacttattttgttccgttgaagtcattgtgtgtttataaagatgaataagatagtgtttatgattaccaaggcagaatgaccatttgaaatatcccagtgccagtattttactttttttagatttcaatttaaaaggagaaggaaaggaagttgggtggttataggagataatattttgagcttttgtcctttttttcatggtggatttttcttcaaagaagacttaatatttaatgagattcaggaaggttacctaattttctgttttctttcattctatccagatctgcttgacatttacctggaaggatgctttcgataaaggttcactttttggaggctctgtaaaactgggtatgtaatttttaataaaagtgataggaaaattggtctaactactttgcattgtttttagtttttaaaattgttatcctaatgactctttgtaaatactaaagttttttacatttcattctctttttagcttcaacttttaatgcaattttg

SEQ ID NO: 1016 - DNA, 333 bp, Homo sapiens
tatttattcctctttagtagaaaggttgactctgatttttctgtgttatgtctgggtagacatttctctggcattttgaaataaaggatttaaagctcagaagagaaagatatacattcgggaacaattattaggtgataataaatttattccttctggcagataattgactgagaaaagtatcaaagtcagagctaagtaatataacattcaggggaaatagaggaagaggttctgggaatgaggttgagaaaaagctttcatatcttacaggaaccagggtaaaatagagatgtgaaggaatgccagaagagtttcaaaggtgatgtggtc

SEQ ID NO: 1017 - DNA, 343 bp, Homo sapiens
aataaaaggcctgccttagttcagagttgttgcattgtacaactctagggtccccggaattgggctccttgggacactcctcatacagaactcagagtaattcctcctccctcgagttgtgcactccaggcaactcgagtgtggtatagtatccactttgtgaaaagttatgtgtgtgaatgtttatgtagttatttgtgagataccaaaaaataaattctggttaactctggaagatgagatgttgggtgatttttaattatttttttgtagtttagaaaaattgtttgaattttagaaagctgttattttcatgagttattttcgttttgaaaaacttaga

SEQ ID NO: 1018 - DNA, 339 bp, Homo sapiens
taaagtaggttagagtagctggtgtttatgtctgctttagtttagaatgaggagactagaactggtttggaagcaagttgaaaactggcctttattacctaggaggccaccaaagtactgtaacaaggagggctttactttatggtacaactctgtggcacaaacatacaaatgtagtgttgttctgattctcctagattggtttgttcagtgttttttgtaaggagccttattttgcctagtggtcaatgccttgcacattatgcaagatcttgaattccaaactgattgaattctgtgagtaatagggagctattgtagattcttttttaaaagtta

SEQ ID NO: 1019 - DNA, 838 bp, Homo sapiens
tgtagattttttttttttaatcagagttgggttttagcccagctaacctgctagccctttgagaaatgtatttgcatgagggagtaaagcataaggccagctaggaggtaattgcattgacttagatttgtggtaatgaggaattggtttgattgtggtgggacaatgtgattttgagaggtgacagaaaaatggaaataatttattcaaatttaagaaactgagagaaatgacatgaaaatgacttttacatttgaatttgattgtaatagaaatgtggaagtaaagggaaggagagaaagaataacttactgttcttcagcgttttgggtgatgggaatattgttgtggaaataaatgcctgtaagggcagcttgaaatatgggagcatatgacagcaagaaaacaggtctggaaacttgtttttgtgagagtcagcgggatgagagaggtcatagtatttctctttgaaacatttgttttctttagaaaaaataatctgatgaatttttccttctcaattttttacagctcttgcaagcttaggatatgaaaagagctgtgtgttgttcaattgtgcagccttagctagccaaattgcagcagaacagaacctggataatgatgaaggattgaaaatcgctgctaaacattaccaggtatgctgaaaagtagttactacaataatggtcaacactaaattggattaagtggaaaataatttgcatttaggtttatagatacttcttacgcaacagatgttttctaaaacgaatgcacttttaaaatgaatttattcttactgttaaagcccttagataaactgtctatagaccag

SEQ ID NO: 1020 - DNA, 295 bp, Homo sapiens
tatgaaatgtctgagatttcatctcaggcatttagggtaaatccattttaaataaattacctaattaaaaaaaatttgtacattattttcatatgttttcttagagtgagacacacttgaaatttcactgttgttacaaaaataaagacaagaaattggcaagaaaataaaattttaactttgagacttgtggagaggtcatatttaaatatggtcagacacataatgttcataagttgcctaatctgttttacgtactgatcatttactaatatggcatgttattttgtggcag

SEQ ID NO: 1021 - DNA, 250 bp, Homo sapiens
gtttcactcccaaacctcccatgaaatttgcttgtctcagaggtagtctgctttttcccgttgtttatgtttagggaagaggtgagtgatgctgttctgagaaagtaaaaggaaaatataccgtaagcaaacaacacgctccaaattgtggcttgccttacagttttgaatgggcatagatgacaaacataatgcatacgctatttctttttgaggctatacatggcaaatattttaaaatgtgaaaacg

SEQ ID NO: 1022 - DNA, 1059 bp, Homo sapiens
aactcatgacaccttttaatcccagactgatttatttctttttcttagtataatttgtttcatgaaagcaaagttattttagtattaacaaaatataattgagatgaaaaatctgatggggaacatttcactagtgagctctgaaggccagacagaaatcactggcaatgggtagtaatgctgttcctcagaggactaggtgtatgtactacctggggtgtcccctaactacggcatgtttaattatttgaaagatgaatttgtttgggaccaaagcaagagcattgcagtactaaaaatattttaatgtttatccccgcctctattctcatgttaattttgaggaagtatatctaaaaatagtttaatcagattgttccattagtttactttgtttttccttgtaatttacttttaatctttgttaaatctcttgttacgctatagagttttagaaagataaccttattgtctgtaggtcagatgttttagattggttttgcataatataaaaatttaaatatattaactgttcactgagttaacatttgaaatgacttttatatgtaacagtaggaaattaagtcttgctgagttcctataaagaaattctttttcccccctttagtttgctagtggtgcctttttacatattaaagagacggttttatctgccttaagtcgagagccgaccgtggacatatctccagatactgttgggaccctcagtcttattatgctggcacaggctcaagaagtattttttttaaaagccacaagaggtaactccaatttatctttttgttgcatgtgaaaaaaagtgataaggcttttaaattaagaaagtgattagaatataatatgttcaatgtcgagctgtccttcttgaacttgatacatgaattatggaaaattttcagctatccttttctgaatttgtggcacaaatttacatttaagaatgtaggctgtgtttgaagtcatgaaatagatctttagtaattgtctttaaacactccattctggaatagtatttatgtatgtttttaacatgtcaga

SEQ ID NO: 1023 - DNA, 1761 bp, Homo sapiens
aattttgtgcagaaaatgtgatttcatcaagaaagatgttttcagatgcgtgtacaaacttgtgacctcagtgtttatactgagacatgtcagattagctcatatttattttaattataatggtcatattgtattccagataaaatgaaagatgccatcatagctaaattggctaatcaggctgcagattattttggtgatgctttcaaacagtgtcaatacaaagatactctccccaaggtcagttattgtttttataaacacttgcttactttgcatgtgaaatatttagacttttttgtgtataagaagcaagttgaaacttataaagaaatttgaagttttaatagagttatctgaagtatatagtagaaatagtttttttttttttttaatttaagatgcatgaacaattcttttatgtttaggggatgcctttgtctttaccttttactaaacttgtttttccaagctagaactctttctggaaaatgttgaccatctgttttcaatacttttatcaaatcaaggcattgtgtagttctgaatcattggtgatttggtacaagcatgtatacttgagcatgttgatgattcacacttttaattattgtcctgttttcttaaagatgagccttaaagcgcaaaaacagacataaagaaaaaaggaaaagaaaacttaacaaattcatctgatactttgattagaattcagttttgccaacagggataaaaaattgggctgctaatggacagctaaggaaagcaaccatcttaaaccacatatcacaggaagtataatgttttaatgtaaacctttctgaagtgacaattgtaaagactattcagtgatgatcatttgttaatgacaaagcaaatcactagtaaatttggaatgattaataaagaaaacttaaagattgagtgaaatatatgtttcaactacttccttcagaaatgttcaaggaattagtttcatcatatggtatctgttacatgattttttttggtaggggaatttattgatttgtaagtcatattcaggaatctttgtacattaaaaaattgcagacaacttgggggtgaagtaaaaatgcacataagtgcattaacagtacttattactcagaaaatgatcaataaggaattaatgtgacgattcctggggatttaagatacaccaagagcctagtagaaatttgcccaggattcttgggtattaacagccttcctcttaaaaagagacttgggatctcctctcatgtttttttcatctgaaagacctcatgttcagctgcacagtgttccgttacatcctgttgggccattagttcagtcctgtcatggagagaagaaagtcacctacaaagacttggaagctacctctgcagcattcctggtattccttgaaaatctcctgtttcagaaccaagttgctccagccttaccttgagaactggcatgagtgtagtttgaaatttagatgtcttttattttttcctttttactaataaagctcataaggtattttcatattctagttataaaactgaaaagtctgcaagtagtgatccaggaaggtaggaaattattccctgggagacaggaaagcacacaaggtagtaattcagtttttgattctcttacattttttgtttagatagtgattgtctagcctaattccttggatttttttaatatcatatacttcctaaaagcagtgaggttacaggttagattttgacgttttggaagagccac

SEQ ID NO: 1024 - DNA, 1644 bp, Homo sapiens
cactagtataattgctttcctgctttatgtctttggatcttttgaaattaattttgactggaattattttcaaaacaaataggcaaaataacactttatcattatcattggtcatatacttagtgcatttgtctatgatatgtttttgagtatatgacactgaaatattagtgtatctatgatactaaatcatttttatatggctaaaatcatcttcagtaagaactctcttaggatatgaatttaagtgaaaatttactgtcttttttttaaaacatgatgaaacagtaatctatagagcaatttcattagtatatgtgagtaatgatggtttagttaactctacaggctgggtaagggctcataagaaagcttctaaagctctgtgctttgtgttcctctgtgaatgtccattctacttctctttctaataatgcatgcttttctttttgtaaacaaaatgttgacttcatggatcaattaaagagaattgtaaaaacctaaattggcttcagttaacagttaaaaaaaaccccttcaattggaagaaaaaaaatttaattcatagatttcaatccacacaaaatcatgtcgtcttctctgtttacacctaatgactaaccttaatctctaaaccattaatggggtgattctaatttctgtcttcttttcctttttcttcctgcatcccatgttgtctgtggtggtttgtgtggttggactctcccctggtcagtatttttatttccaggaggtgttccctgtcttggctgcaaagcactgtatcatgcaggccaatgctgagtaccatcagtctatcctggcaaaacagcagaagaaatttggagaagaaattgcaaggttacaggtgagtctcttggtaataaatatttaagtaactaacttggatctctcttttttttcctagtgagatttccaagtttgcccataaaaacctttcccgttcatcacccctatcagcagggacaagtgattgtttttatctttagactttactgcatgtttttttgaggtctcatattttatctaaaaaatagatgcaaaatttgcattcaattctcttttttatccatgtttattttaatgtaaaaataattctaaattaattgccatctccagattgtttttgtctttagactttactgcatggttttttgaggtctcatattttatctgaaaaattcatgcagaatttgcattcagttctcttttttggtcatgtttattttagtgtaaaaataattctaaattaattgccatgctccaggagtatgtgtagtgtttaacttgtggcctggtctttgtctaaactggggcatatacttccacaacttgaggacgacagtggagagatgtgtgtgcatatatatatatatacacacatatatctcttgtgaacagcagagtaccttctatgcagttgtgttcatactgttggcattggggttgtcagaaacttgctgtgacattatggcacctgaggcaacttgccagcaggagcaagagctgtttgtatgagttgtttgtgttttgagtattggtagacagaggatagaaagatgacttatggcatttgagttagggaagtttaaatatgtactgatttttagaagatactatgga

SEQ ID NO: 1025 - DNA, 471 bp, Homo sapiens
atggaaatgttgtttaggaggttcagattaattaattagccttttcatgggaaaggatctcacagtgaccaaatcagagaaagtctttttaaaaaagtcagacccagatgtgtctggggcttcactttgattacagtaacttagatttatatataaaaatgattctgaacaaggaatttgtgggaaggattctttttttaaggctagcatatttaaattgtaagtttagtttctttattttctggtttctgggactattagatttaagtaagcccatatttagtctctataaatcagtcagagaaagaactccttttgaaatttaatctcatttttaagtacccctgaaaaaggaaactatttcagattcacacaatgggagggaggtaaatacttttcctcagttatagacacatagattttgcagctttagttttacagctttagttataggttaaagttaagacagaa

SEQ ID NO: 1026 - DNA, 488 bp, Homo sapiens
gttaacacagaacacactcactgatccatatttcagaggacagttattctttccggtaggcatgaaatattttttaattgatttgcactcccaagaagacaaacagaacagacaagaagttgaccaataaaccatattcgctgtagtttctcacttagtagagaataataccccatgattctgacggagatcttaggaggtcacactattaaaccaactttctagttatggctactagcaaagagaaataacttattggtcctgtgcaaaccagaaatgaaaataaaatcacaatcaggaaaatcaaaacaatagataaaatggcagcaaaggtaaaataactgcttggaatcaatcacttctggggccaagaaaaattgtacctgagcttaatacagctcatgagttgcacttcttgaacagtgcagtttatgtggccccagaagatggatcttcttggtcatcttggtggatcttcaaagatgatg

SEQ ID NO: 1027 - DNA, 961 bp, Homo sapiens
gagatgagttgacttttcagttacttaggtttgaatgagattgattttgctgggggttcctgtgcagggaaatgggcaggggttagctttacaagcatcattgtgttaagggctccctcctaaggtccacttctctggctcttaaagcctaccctggattaggaagaatcccactacctctgtacctgtgcttccctgaattcctcacagcctttgcatttcaagttgatgcatctacttttagggtttatattttgctggcattttctgagtgcttatgccctttcttctccctccctacttttctgttctctctttctgctccccctagcaaccctgtctttttagttaatctgtctacttctttttctcaccagctctcttgggatgaggcccctcagcatcacatttttttctgtggtcccctggtggcatgataggggccagttggctttgcctttaccgtcacctggcaaggttttctcatcctgttttgttgttttcagatttgcttaaagtaattttaacttagggtggcacccttagcacttccctttcttccccctctgtgtatagcgtacctacggttctggtactagtgtttgctatttgggggagggttcaaccacatttacaaatcaaatttgatttacaaatttaaaaagtgatttaaatttgtgcaatttcccgtttcctagtttacactgaagggtagcttttgttttgttttggttatctttctctaagcatgataccagctttggaggttaagatttttatcatgttaaggaactataatttctattttacgaagattttaaaaaatcaagaatattgaattttatcaaatactttttcaacatctatggagaaatttgattttttaacttattattttggagaattatataagtagattttctagtattaaaccatttttgtattcttgttattttggtgt

SEQ ID NO: 1028 - DNA, 641 bp, Homo sapiens
ttcagattaaagattttttttttgaaaccaatgcttaaatacttggtggggaaagagaaataaaatcacctccctcttttttttttttgttgttgacgtttttctttttagcatgcagcagaactgattaaaacagtggcatctcgctatgatgaatatgttaatgtgaaggatttttctgacaaaatcaatcgtgcccttgctgcagcaaagaaggataatgacttcatttatcatgatcgagttccagaccttaaagatctagatcctattggcaaagccacacttgtgaaatctaccccggtcaatgtacccatcagtcagaaatttactggtatgtcagttattcagacacactttaatctcatttttctctagtttactctgtttttcctagctaaaaatcacataattgctgttgtatgctttgaatataatttgtattcatgttgtttaaaatgaatatgagaataaatattgtgccagtgcaatgttaagatggaaagtaaacaataataaagcatatgtaaagtatacaatagttagaagacttgaaactgtgtgtttgattaagactgtagcacttgtcattttgttaacttttgttatttaagatgctgccattaaaaataaacaaatat

SEQ ID NO: 1029 - DNA, 163 bp, Homo sapiens
tatttctttaaacatgtaaacttctggagtggtatttgtatgagataaatacatgttattatattgtagatgtatacaacagatggtagcctctagctgagattccaaggagaatattctgttactgggaaagggtgattatatgtttatttagcaaacacaa

SEQ ID NO: 1030 - DNA, 789 bp, Homo sapiens
cctcattcagtttaatcaacagatgaacagtgtcactgaagatccctcaaactcagtgatgaacacatctgaaaaagaaagaaaattaagttcaaagaagaaacttttcattgttgccgttgtccatgaatgtagtgatctaaaaattctctttatcattgtgctttaaatagtgatttagttttgatctttaaatgtcaatagacaataaatatttatagactatgtgaatattggaaagaaaatataaacagtcacttttacagttcgggtttttgtctaaaaattttgttgtaatttctcttcctaattttagatctgtttgagaagatggttcccgtgtcagtacagcagtctttggctgcctataatcagaggaaagccgatttggttaacagatcaattgctcagatgagagaagccaccactttggcaaatgggtaggtagagcttaattttagagcctaaagttttccgtttggttgttctttagtttatgaacattttagtttctgagcttagagctaaatgtcaagagtatataaaatagaaaatgtagacacacacttacaactatttttgttggacactgtatttatgaagctctagcaaatatagttggaagaaattatagaaacaaggtgaggatatgaggactaaaaatttgtattttaagaggtatttatttggaaatgagaagtagaaatgaactcagatacatggtacatttagtgttctgaaccaatttttgtttctgatggactgaatactaagaaaataattcattgg

SEQ ID NO: 1031 - DNA, 523 bp, Homo sapiens
agttttgattaatgcatggattttaccatcatttttctctaacaagaaaggaatgtaagtttactctagcatatgataaacaggcagtctgagattttacagagcttattttctgaggagttcattgtattacatcatttcatttgcctttttgtcgttacatagtagatagggatatgtacctcccttcgccatcatgtaactgaaataactgaggaattgttattgtgctacaaaactgagaacagatgaagattctgtaatgaatacttagatcatctattttctgttgacattttgcctagatgatgtgaaattataactattgattctgttgaaagagagcaaaaaagaaaaaaataactattttgtgtattgtttctgacttgttagagatgctgtaacaatcaaaagtataaaagactgcttttttaggatagaatttttgacttttaattacttagactgaaagaagtttgaactgtaagccgacgatacctaatatattttaatgcggtcatag

SEQ ID NO: 1032 - DNA, 724 bp, Homo sapiens
tttgctttgcttttaattgatagggcttatccagtttttctgggtgctaactccattgctgttgatttggttatagaatactaaattaaataaagtaagtattgatgaggagttaaattgttttagacttcagtataacatagtatctcattttttcagggtgctagcttcccttaatcttccagcagcaattgaagatgtgtctggagacactgtacctcagtctatattgactaaatccagatctgtgattgaacagggaggcatccagactgttgatcagttgattaaagaactgcctgaattactgcaacgaaatagagaaatcctagatgaggtatgttttataagatttgcttttcaagtataaacactgtgatcccttgatgtccagcagggattgggactggagacttcctcatgctagtacagtgtagttagtattcatcactttggtgaatttactgtggcccagagccttctctttagcataagagaaattctggttgagtgagaatgggtttcattcttatcttaagggtaagtaagtacacactaatgaaactcaaatgaccactgtgtaaaactagtatactgtgagaaatcaactgtcatacaaactgttcagtctttgtaattattgatttattttatgcatagcatgtagcaagatttttctttttaatttaatttgtcttaacctggaaggttaaaccctttaatt

SEQ ID NO: 1033 - DNA, 404 bp, Homo sapiens
taaaaaggcattatatacctggtacctcctcaaacttaagaggttttttcctttcttttataatcttttaattatagtagtaatttatcttaagactttgtgtcacacagatagtgcggtttctagtcccaagttcaggcttttgatcaggaatctcagataatacttcttgttttttcttttttctttagagccaaggtccagacaggcatgttttcttttgtagggcagttttctgttttaaaaattcatccactgagaatcacctgtttggaagtataccagtttgagggtggagagtgcttttgatctgacctctcaccttttattgtccctacctatgtttcttgttgacttttcatgttctaaattcacaatccaagtcaatggtgaactacacagct

SEQ ID NO: 1034 - DNA, 914 bp, Homo sapiens
tattctttgtcctaagctatcagggattgtcatacattgttggtgctagcactgtgtctactggtagattagtatttccttgtgtttctggccccctactatcctgtcatcttatctgtgcattaaaaaggcatttaaaaatatattaaacataattttctgtttgttgtattggaatgaaagtctaaattttatattttttaatgtaattgatcagttttccccttttgtttatggcttctatttatttattttaatcttaaaactttctttaaattgatatatggatgtaaatagtctcttatttattcctccttttttttttttttactgagaaaggtgatagctaattcacccttaaatttataagactttttgttaaatgcattataacttagatgtctgcaagaaaaaagtcgatttatattctaacctagtattcccatctcaccaaattctcacttatattgtgtatgaacatttattaaatgtattaaagtttttataccagaaatgacatttcagggttctttttgcttccttttaaagtcattaaggttgttggatgaagaagaagcaaccgataatgatttaagagcaaaatttaaggaacgttggcaaaggacaccatccaatgaactgtataagcctttaagagcaggtaaaaatgtgtataaatgaccttcatttgaataaattcccaatttcgacccacgtttttgcttgattaaattaggctcagttgtaaattcatttttaccgaaactgtttttcctcagttttagtataaagattaaaaaagttcacaaaagtaatctgccaattgtcagaagtacagatttttaagaaaggtatgaagtgaaaagttaaaatgatcctccaactttcattttctgttccaaactctgtgcata

SEQ ID NO: 1035 - DNA, 1552 bp, Homo sapiens
cctgtgcatattttaaaaacataaatgagagcatattacatttatggctttgtaatttttttcatttagtagtgaatcctgggtggtaaaaaaaaaaatgagctttaagttattttgaggccaaatttatgcttcttaagactttgattattaagattttgtgcttgctgagataaatgctatcttcatggtggctggagattagttttatttatctttgtaaaaagttcatatattattgagatttttctaaaaatcttttttttttttaagtcacattgctcttttgacagaggaatacttttaaaataaatggaccagtttttggagagaatgatttcttcttcattcatgagttataggaaaagattaatattaattaacttttatttggcagatagtaaccaccaaatgtattttaaggtatagctatgcttttgattttataagtgattttgtcatctttctaaaaacgagaacgcaaagactgtcaggagctgtttttattatgaagtgaattggggtctatagaaggggaggataagtaaagttggagactagaactcaacatataaccagccgataaacgttgctgttagaatcacttctgtgctctgcaaacttttattttctcccagagggaaccaacttcagaacagttttagataaagctgtgcaggcagatggacaagtgaaagaatgttaccagtctcatcgtgacaccatcgtgcttttgtgtaagccagagcctgagctgaatgctgccatcccttctgctaatccagcaaagaccatgcagggcagtgaggtaagaaggacactttgatgtaggttgtcatctgcttaagaaaaccacattcaagccattttatataatgaactgccaatttcttattgtcaactttaaaaaaatgcagaaataaattggggttgttatatttaaagtagtatatagactgtgtaatagataattatactaatattaactgtcctgtaatagtaacttccatttattgaatgcccttttttgaactaaattttagatacttcataggtcaacagtatttaatttgggttttataaaagagagaagcttggaagtatagaaatttcctgaaatgaaaggactgggtatagccagatacacaaattctttatttcttacattattctatactcctttccaccttgtttcaccggaactacctttgaaaggaagattgacaaggtgtgcatgttaataaatggatagcaccatcatggtatttctactgatgacaggaaagagaaaattgaatagtagggcatctgatttggaaagtcctaaaagaagagaaagtgcaagtataatttaatgacctatcacagggagatagggtaagttagtaggaaaagatagaggtcccaaatctctgcacaggaaaacaagcgaaagggcaagaaatactgctgaaaacttcttgaaaaaagtgaatttcctgggatagtaagttttgaaaagtttgagttttgttccttatttgtctttccatagaagcattttatatatttc

SEQ ID NO: 1036 - DNA, 1327 bp, Homo sapiens
aagaagtttaaaaatgtcacagggaaagtataggaagtatgttacgaggatttagatgaagtacttaaatttcagtaattttggagtagttctcttcagaggcttcttaagagattggcacattatgagaacagagtggataggcagaaaaagtaaacgtgtaggatcggagaagggctgagtagtggctgtgtctagagagttatccgaggtacagaggatctgcaaagacagcttttactcctgatttcttgtgacagaaggtttacagacatgttgagaatggctggaatctgtttgtttatttatttattcactaagtgtttgaaggcctactattccagaacagtgctgagcaccttggtccctaacataaagagacaaaaaactgctctgggttacctttagtgtagagtaaatgcacaggtactgggcacctctcaaagggaagagaaggctacatagttgaatgtgcattgaacctggatctaacgggggaacccaatggaacaaggaatgtgagttattgttttgaggacataggggagaaaaggaggtggtcagaagattaacttgtgaagaacaacgaacctgaagaagaaactgcagacccttcgaacagcaataaattttggtaccttttttattttagaaaaagatttctggttagtactttctttgtattctttttggtgtcttgtacatgactcagaattatgtggctttcgtcctttgattcttctgctttcagtagaaaagcaaaaatggtttgtgctaagcaaaatctgcattagtatgcactgatatattgctattttattcagttatatcagttttattaatccttacttgtgttacacaggagaaaggaacttttatagtcaatacgaagtaattttatggaagctagattttcttgacggggtaaccacaaaaatttcagtactctctgtatattcgtttgtcatgtgccttaatcaaataaggcaagcatcaggtttatcaaagctatttcagactggttataatagttgatgacggattttagccagaatttttatgataaaaactcagttttttgattgctgattagagtgatgcaaatgtacatgttttattaaaaagtccaagtttgatggtagggctgttttttcttttattgtgaagaagcctactgtctggttacttattttcagtctctttggacatctggttttagacattgagatactctgacaaattttgcagactagtggtaatttgtatttaaagatttttgtattaaatacctaggatcactgcttgtgattggttgcctatgatgtac

SEQ ID NO: 1037 - DNA, 251 bp, Homo sapiens
ttgatgttcagttatactcaaagtgttacatctgctgggagtaatggagggggtacctttaaaaaaaaaaaccctttacctccttacaggtagagcataaagagaattgtttaaaactgtgtgccctcccagaggagtgccttttttggattcacagactagtggaggatctgcaaacacagcttttactcctgatttctcatgacagaaagtttatagacatattgacaatgactggaatctgtttgttt

SEQ ID NO: 1038 - DNA, 698 bp, Homo sapiens
tccatctttgtcattgtctacccacattattctatttttgtgtatttgtttaatcctcccctttgcatatttatttaatcctctctggtccccaaatgaaggaaaagactgtttttgttagtagttgtgtccatagcatctagaatggtacccaaaacaaaagtatttgtttgaatgatcatcactggcagcctaacttaataaagggatacatttaattgcagttgaaaggtagctggagttgtgtataagaaataaatatgctaggattctaattatttatatactttgataacatgttaaacctcaaatttgaatttataagaaaatttaggcagtggttttcttattatcttggtcattcatttgtggaagcagtttaattcattttctacttcatttactctgttaaaatgaggccagtgccttataatctgaaatatgttaaactagtgtactgcatatgaatttttttaaaaagatgttcataatataagggatctctatctttgtgtggtagtccacaagttcgttcataaattcgttgtttgaaatggcatttttttttccccagaaagttagaattattgcatttttgaatatcacagaatttgttaactatttgaccctctctgtatcagtctggttggataccatggaagttgtggttagcttttcttcctaatctaagtaatatg

SEQ ID NO: 1039 - DNA, 194 bp, Homo sapiens
tggaaggaaacttttattcacatcgtctgatatcaagttctgctaggtctttaaacagactttgtcatatccacccacgtatgattctttctcctcctccttccttttagagtttctgtggtttgatgctttctagactctaggaatcatatttctttctctttccacagccttctcccctgtaccctcttctt

SEQ ID NO: 1040 - DNA, 527 bp, Homo sapiens
ttctgttcctttcctttccttccattttaaaattaggatgtttaggagatatggatgtaaacaaggccaaaaaggaaattcacctacatttagcagaaacctcgagtctctggtcttcacaaagggatgttactttggacattcctatcaaggagctaactaagactgtggaagaaagagtagaataggaatttttagaaacaggcagttggtaggggaatccatgggaattggaattgctgctggtagtgagaaagacaggggtggagacagggctcgtgatgtcctcttcttcctttgtctttcccccagttttctttctatgagcatcattggggcaagcagaatagagagattgggttgatgttcttggtggtcttagcaaagtatgaagagatgagtgaaaggggcagcttgaaagtgctcattagaaggcacttgaacactatgaatatgaaggggtatttatgaatcaggtgggtataggtcagagagtgtcttgactgaatacaagagataaatctctg

SEQ ID NO: 1041 - DNA, 652 bp, Homo sapiens
atgttggctattgttattaatgctgcttttgttttaatatgagtcaactgaaggtacagtgtctatctatataaacctgacgttcaatttatatttggctctctgagaaatcatctctctctcagcccgaatgaacctttatatattatttccttctcgaaattggctttttttttttttttttttgcagttaaactaaggtgtcttttttgtttaggttgtaaatgtcttaaaatccttattgtcaaatcttgatgaagtaaagaaggaaagagagggtctggagaatgacttgaaatctgtgaattttgacatgacaagcaagtttttgacagccctggctcaagatggtgtgataaatgaagaagctctttctgttactgaactagatcgagtctatggaggtcttacaactaaagtccaagaatctctaaagaaacaggagggacttcttaaaaatattcaggtgaaatttatatatttaataagatctgtgttttaaaaattacagaaaagatatgtctggactaaacctatattcagttaggaaaatgacattggagaatatctgtagttaagagtagaacttaatacatgtatattttgtaaaattaaacttggcacatcagttttatctatgaaacaaagtcac

SEQ ID NO: 1042 - DNA, 606 bp, Homo sapiens
agaaacaaagtcatttctatggctaaaatgttgcatattacttaggagtgcttgatacttcagatatttttcatggttccaagtttttaatagctttggttttttttccatatgggaggaaaatcgaaattagttggaattactgatacctttaattgtatggctaacatacatacagacttcagtcattttttaaaaaaataatgcaaagtaaatatgttgagaagtttgaagttagttttcgtgtttacagataggtagtttggactaacaaatacttgaaagtttgcccttttaatagttaatatgcaaaattaaacatatatttctactcctaaacattgtatctatatatgatataaaataactccaaaaggtaaaataattttcatgttatattttttacaagtgttatatactaatagaaatctgtgatcattattggttgttttgactcctattggatttttgaaatttttacttaagaaagatttaaagcataatgaggcttcaaaagagtgtactaggtattctagtaattttgcatatgtatttaattacatatgattttcataattggaaaagatcaataaaaatgttatgagc

SEQ ID NO: 1043 - DNA, 1144 bp, Homo sapiens
gtaaatctttcttttaacaaggtctcacatcaggaattttcaaaaatgaaacaatctaataatgaagctaacttaagagaagaagttttgaagaatttagctactgcatatgacaactttgttgaacttgtagctaatttgaaggaaggcacaaaggtatgaagtacatgcaaaaggaaccatagctagcaagtacagatgtgaacgcatagtttggaagttaagtggtatttccagttgaaccaaattgctctttgcctagaattttagctttaatgccattgctgctgcgaagtttgttataggagggagaaagcttaatgaaggtggcaacatttcatgggaactttgaagaatgaattgcatatttcaactggcagaaaaggggtataaatattccaggtagcaggaattagcagagatgtcaatgacacctttttaagggataggaagttgactaatttgatgaattttgaggggcaggagtagtcaaagctgatttgtgatggaaaagcggaggggcatgacttttatgttctctgcggtggtttgctgaggacagacttgtggcctgcccaagtgtcagaaggcttactgaatatgtaagtactttcttgccttgtcctttaaaaagtttagggaattcgcttatatttctttttaccaatttgtttttgagggaacagtgatttttaagttttttcagatgcataattccttttggtacttaacttcataataatcactgaataaagttaccttgatataaatacagtaggtaaaatgtaaaaccctctgaagagagggtgaaaatactgcaaagccttccaaatagagaggatagtaaaatgccattttaatttggtttaaaatgctttgtttaaataggtaagctgagaaaaccctccagagagcctttagaaattcttttaagggtttctgaagtatgcttgcatttctgtagtgaatttgaaaacctaatccttccacttaaataggtttaatgttattaaacaattgacttttctctaggaattaggaaggttttcatgatcatgaatcttttaacttgttacattttttatgataatgttctgtaaaaatgcttttattatttttattttctttaggagtcttagatcat

SEQ ID NO: 1044 - DNA, 901 bp, Homo sapiens
atttaatattaagttgttgggcctagtaaattgtataaatgtatctcatgcagatctcagttcttcggctctaactatcattgacaaattagctttagatcacattactctctggattaaaaaattgttcttgttccttacttgtatttgttctttgcttatagttttacaatgagttgactgaaatcctggtcaggttccagaacaaatgcagtgatatagtttttgcacggaagacagaaagagatgaactcttaaagtaagtctgttttgtgtaccaaattgtacttaaagaattttcttttaaaaaatcatgtagagacttttggtatgaacttggtagtatgagatagcaattttcctcttctcatggaagaaggaactagatagagtattttacaaagcaacaagtaaacagctgcataatctgggaatgaaaggatgaaaagaagcagaaactctagatgcaggaagtacagtgaggtcacagaaatgataaaaacagttcaggtggcagatctcaggaagtgccagtaaatacaagcaatttattttgaagtggcaaataggttccttacataaaactagagctatagaacatggaggagacagcatgaatagctcagagaataccagcaaaatcactttcagaaggaggctgctgagaaagcagggccagttaacatacgactcatttcctgctgagtaatcaatacagagtagcacagtgctgataaaaggtggaaaacattaacaaaatttaataaaacttcatagatgaagaacatttaccaaaataatattgtcacagaataggtgaaaattatgagcaaacatctgaccatgagctaaacaaaaacaacaacaacaacaaatgtaaggaggcaatcattctaaggcc

SEQ ID NO: 1045 - DNA, 323 bp, Homo sapiens
tgaatttagtgtaaaagatcttcagccaaccagaagaggtggacaactgcccagccatttagaaaataaaagttatctttataccagagtaagttctgagtggaccaaacttgaaatttgtaaatgaaatataaggtgtaaaatagaatggaggagaattccgtaataaagctgggatgagcaggatctaataactcctacttaaaatccagaagccattaaaaaaaaagaaaagaataagtttctcatagaaatatgataaacagagtcaggatatgacaaattgggaatccaatatttgaaacttattcacaggcaaaagg

SEQ ID NO: 1046 - DNA, 178 bp, Homo sapiens
caggtttgttgtaaacaagtatatattttatttacacttgtcaagtattttcagctcagtgattgaaaggtgaatgaaagatggaaaagtaggccatataataatattagcttttgaatatctgagagtttattttgttaaagtcgttgttaatactgaaggccaaaatcctttgaaa

SEQ ID NO: 1047 - DNA, 1260 bp, Homo sapiens
tggaggctttgctttttaatttctgttttcattgaaatctttcatcagaagtttaaagcgtttaagaagaatgaatattttactctgagctttactttcttttgactaatggtttgaatactactgtcaggttgttgggcatagtactagtggcattttattttatatctttttgctcttttacattattgattttatttaatagcattgatttatatcttttataagtggctaggaaattatcatttgctctataaatgtgttatttactgcaaccatccctagagtttatcaaaggaaaagaaaggtattgtgttaaagctttataatatacgtatatattttagatatttcaaaatctggccttttagaattttgatattgattaaaaacttatttattttataagcagttatttacttaagaagtagttttgttttttttttttgatgaatgtatactagttttctttatgtctggagtgactggggcccttcttgagagggaaggttggatgcggacagtgtggggctttgctgttaattgttaaatcagggcaaaaggtactgtctcagatgttttgggacatgtcatatttacttctttgtgtacgttaatcagtgcagtgaaaagatgattgacatcatgtattacatggagtgcattttaccttaggtattgtttagtgtgattttgggataaatttcaatttactgttagaggagacagaattttctaatatttaatactaaattgtaatagtattttcagcaatatatctttcatgagtttatcttagtgacaggtgatgtgttatcttttaatataaaatatttcaacgccacatttctttgaatatcttcaggaagtttttatctagaaatttgcataatggtttgcataaaaggttagccttttcacctgttttattttgtataaacactgatatagtgattaaaacattagctacataactatgagtcactgtagttttctgataacttttagatagatgatgttaggagttttttaaatccagggactaccttttattagagggtgggcagtcttttaggattacttgcccagtttgacacgtttcttactctagctgtaactgtgatctctgaaaatgtttactttttcccccagtcttcagaaatataaaaaagatacaacttcattttattaaacaataggaagaaagaggatttagattctagtcaagaataaaaatgtagtatattttgtttttttcag

SEQ ID NO: 1048 - DNA, 838 bp, Homo sapiens
tgtaaagtttggggactaggaggagatgatggtagtaaacagtacctgtgctgcttccttccacctcaaatgtccaaccactggaggaagcagtaaatgattaaatatgaggcaccaggaaaagagcagtggctatggagtttccacaggttggaaaattattcaactatgatatatttctatagtaataagccggtatttaagaatgggaattaaaaatatatttggttggattctagagtttctcatatgtccttattaattttaattaatagcaatttgagagaaatatgaaacattttatagtcaatgctgactttttcttatagcctactaagccccagcccccagccaggcctccaccacctgtgcttccagcaaatcgagctccttctgctactgctccatctccagtgggggctgggactgctgcgccagctccatcacaaacgcctggctcagctcctcctccacaggcgcagggaccaccctatcccacctatccaggatatcctgggtaaggctgcaacattgtgtatcccaagttggctaatgttgtttctaggctctggctaacctgttaaaaacagggtcatcccttctccaaatggaggtgtcatgaatgaataagctacactgtcagcttatccagaaatgaaaataatgttatggtcacttacatgaataggatagctatttcctaggcttttaaaatttatgtttttatattttacatattgggtttatattaaataatcttttctgtattatagagtttagtaggtgtttccttggactttaggtgataaacaggtaccttttctgagcgtagcatagc

SEQ ID NO: 1049 - DNA, 1224 bp, Homo sapiens
aaaactgataaggccttgtttacgtccctatacttagaatacttggcatttaataaacagttgaatagaaatttatctaattatgggttgcactttcttaaaggttaatctctgtggtaatttcttaattttaaaaatccaaacatttgactaccttttaagatgtgctctaaattttacttagtaagtacatgttgtctgccaaatattagaactttataagttgtaaatttatgtatatcacagtgaatattgaatattgtggaagaggaatgtatttagatgactagttttgccacgttaaaatgaagggtctccattttttttctttctttaatactcgaatatttaatcttattttcttcagtatttatttttggatagtattaaacacttggtactcttttgttttaattaataacaggataggaatgcttttctctgacaagtgccttgaaacagtttttttcactccactgttctttaatagactaaaaaatagaaatgactttcatgaaaaacgtagttctagaatgattattgttttattttttagtatttgatttaccaatcaagatttttctgttttcttctatcaggtattgccaaatgcccatgcccatgggctataatccttatgcgtatggccagtataatatgccatatccaccagtgtatcaccagagtcctggacaggctccatacccgggaccccagcagccttcataccccttccctcagcccccacagcagtcttactatccacagcagtaatatgtctgctcagcagctcagctgattcagatcagagggaaagaaataccaaccctgcaataagtgtactaaactctacgctctggttaatgtaatgtactctcctggactgaatgcagtgtataatttctgtctacagctagaagctgtgccccagttccacatttgattacacatgtgagatttgctgctgttgcagtataaacactaggtataataggatttgaaattgcattacagttcataaaaattgaaaatgagaaattaaacctgcaagtgaaacatttgaaacgattatactttctacataagacatggttgggacatcagatacttacaaagatggtttaagtatggatactagagaaaattaagttttctttctctttggtttattgatttggtttaatttccattatgctattttgcataatcaaggcactgtaaatc

SEQ ID NO: 1050 - DNA, 2005 bp, Homo sapiens
cttaagaacagttgtcattgttatgttttgttattgattctcattactgtctaattttttttctggtattagtctcattttgtatgtatataagttaaacagatactgtttttaagtgcatgaatagtacaagttattatcaaggatgttttacagggaaatcaaaagaatattatcatactttatctttcgtatgctgattagtaaacgatttttgacatttattttagaaagtcctataatgtggaagaaacaaacagttgctaccaaagattcttcaaataaacatacaaataaatgtgtatatttaatgttttattgttagcttctccagaaaattgatgcaaattctggtaataattcttgcattttttccccataacctggttaaaataaatacgccattggcaatacttcataatgtaatggaattgtttggggaacacttactgtaccctctcatcctttttccaccttactgtgttaacttagtgacatttaatgcccaatatgtatgaatagatctaagccatttaattttttttccttaaagattggagtattttataattcaaggagcatacaaaacaatggttgggaacatatgccaattatggaataggctatgtatttaatattaatctctgccattaggatatctactcactgtataaacctcagtaaaaatagtgaagacatgcatcatggaatgagaaaatgagaaaggaatgagttgtctaacatcacagtgggatctgttttttgtgaggttcatttctgaacacattaggcatatgagcagatttccagtgaatctatttatgtttattttctgagtttcaacgctgaccttttcttgcattattgtttcattttaatgatagtgttacttgtcccactgttgttttcattgagtttggatttatattttaaatgttcgaatgaaagtatgattgtaaaagggagtgaattggtttaaaaatatatgtatattttaaactttgttgtgtgtaggaaacatgaaggcatgttaattcaatataaatgacctttgatttcatggaatattaaagttggtttaaagtccaatagttaaaccttagcaaaaatagctttttacttcatcagttgctaagatttaatactttggattcatcaaagtgtgacatgggcttgtttgacttctgtaagtggcatttaagttccacattcttattacttgaggtactttatactaacataagacagtgagagttagaggtattacaagttgctagtttataatgtcttactaatgcagaaacaaggaaaaaagcaaaattggcctgaatattctcttggggaaagagggcaccaaagaaaagggtaagtgcatctgagggccaaaagagatgtataagccttttagcccattccccatgctgggcctgctcacagagccacaggaagatcattcagaaactaggaaaggaggcccccacagctgatcctgccacagcacacctgactcactcggctctgttagtgtaaccttttaaatgtagcaacacaaaccctttccctcttgtcagttcactcatcctttggtttctttttaatcacctgtgtctgggcacagacaatcacaataaatgcagccctttattactgttaaggatcatactgttggtttggagttggaagggtactactctgtgattcaggtgtgttgtacccatatttataattaggctttattatcttcctaaatcaaggaaaggaaatcatccccagaccatttatgctgagctttggaatactattttaaactggattgtacttaaataatgaagctctgcatagaggaactagtcagaagtggggaaaacactgtctaatttttatcagtctggtataaagtattgatctaagagaactctccctgtgccccttggtctttattctcaattaagaaaaacagtcacatgtcacgacaaaccaatcaatctttatgagatattcctgt

SEQ ID NO: 1051 - DNA, 1544 bp, Homo sapiens
atccataccccagcttgtttgcaatttataaacctccccttcaaaactaaggagttgcagaaaaaaatggatttcacagagccttgtgtccctaaagttctgtcccagtcagcagtctttatagtccaaacagattataaaaaatgttttccatttgaactttacagtttgcaaaagtgcttttatacattttctaatttcagaaacaggataatttgttaagtgggtttcagtttgctaatagggattttttgtgttttgttttttaattttcagcatctcttgaagaatcttgctacagccaaatggcatctcactttttaaagacgtttgcaattattagttgattcacagtacagaacaaggtataaaggaaaaaaccctgctaggtagtgttataattgctagattaaaaatagactagaacaggttcattttaagatttacttggaagagcaaagaaggaaaaattatatttttaaagaaagagaatattcaggctttatttctggtatgaagtttatattttttaaaaaaatcctatattatcacaccagagattttagattcttttctggttagaaacattgctggtagttggattatatttttattgtattcatttatcttagggggaacattgtaaagaaacaaaaaggtccagatgaatgtatgctagaaataaaagttgaaagattcttacttctttggagtatgaattcttatttaaagtgtttattcttcagctttatagtttccattatttctttgacaaatggtgaattggaaaatgtaaaaaaaatacccactttgactaaatgcatgagactacaaaaggaagatagtgtttaaattttttttttttcacacctgcaacctgataatttagcggtcatggatgggccatgtttttcattgcttatgtgatttactctaggagtattcttttcaaataccactttttaggttaatttttggaaatgatcagcaagattactatactcatcagctgatgaggggaagggggatgggttctgctgcatcccgagtgaagatgactgagaagctgtgtgcttggcctgctttagtatttactgctatcacagggcaggattggcttaggaactccctgtgagcagaccgactacagcctgtgaaccagagggcttcatgccaccgagcctcagaccacaggctactgccagtcagtgtccctgcccaatgaccggtcttgcctttgtaagttatcaatttggggcacatccaagctgtctgccttttctcctcattggtgctgtgcaaaggatcctggcttctctcagttctgtggctcccgcgatcctttctgcttaaaagttgcgtaagttatgaacacaggtgatacaggtgaagaggttcaagtctattaccattgtttttaagtgttcctatatttttaactgttttaagctttacacactttgaagcccacatgattcgcactcatcaagtatgtctttattgtgaacatgaagtggcccttttccatcttgcagtatattcta

SEQ ID NO: 1052 - DNA, 991 bp, Homo sapiens
ggagggggatggggaagggaaaacttataaacagggtttaggctcataattgctaatgcactattatttttacattgtacatctcgattataattgttaatgtttgcatttttttattactcgatttataaaatatgtaaacatggtctattataacttggttatagctggtcctcttctcttgttcccttcttgggatgcttttgaacattcaggaggtttggtcttgccctctctcttagaccagtcttactctgcctccagcctgtgggcttctctgttgccagcaggtgccagtgattctggatgaggaactccctgaggggccagtgtcttctttttccactgaaccctggaagaagaggggtgcacaagaatggccccttcagccttcatcagcctcccacaatggactgggctgcataatgtgttctttttaaaagtagtatgttttttgaataggcaatacacggtataaatttcaaaaggtagaaaatggtgtatgatagtaagtgtccttcctgcccctgtcccttgacccagttttcttccttaagacagtctccactaccagggcgcacagggttcacattgtatttagacttaacagctcccagaagcaggtgtgttgtgaccctctgtggaaggcacacaatgaattgtgatagttgcatctaaaactggagttttattctttcatagagaccaaagactgtttttagctagagaattatttctaagttcagctacgcttgacattattaagaacagtaacatgtactgaatcgctgccaatttctaatcccactatgctttcatgttctttcaaaattatccaaggtatatatcataattttttataaagatttgcattttaggctgatatttaagtagtttttcagcaagaaacttgtaacattgaatcacagagaatagctatatctagaaagggaacagagcataaccacatttaattccttttgacaacgtc

SEQ ID NO: 1053 - DNA, 488 bp, Homo sapiens
tatactcagtttggtttattagcaacttctttgttctgctccctgggttataccgagtatactgcatcctctagcttctctcatcagcaggaaggtgggaatttacaacacggtggtgactccacaaaggccacgtgggcccagcgttggctgcaccattccctttaatgaaagagtatttggttcctaaaggaagattcactttcttatttcttgtttcgtattttagggtctttatgttattccctttccataacagtgtcttttatcactattggggttttcagaaaggaaatacaatgtagatggaagtgaggcgactgcacaagggaaggcacttggaaacagaccacagtgctgtggaagagatatctgttgcctttttttccttgtaagtaatgtgttacaaaacttttaaccattagagttgaaatttttctccagcaaagatctgtctttactcaaattacctggtaatgtatgaactt

SEQ ID NO: 1054 - DNA, 338 bp, Homo sapiens
gagcagaaccccagaagtccagatgagctttggatacaaatactcaagcctttagtaagcttggaggatttttcacttctcttccatgtgctctcgactgccttctggaatctctattgttacagatactagatctctccacatgttttctatctgtgtagcacataataaatgtttagtaatgttagctactattattttttacccattattttaatcttccacctttttcttgattggagaagtttcttgaaataatctaattcacaattcctttttctgcagcacttggtctgccacacactgtcaccaatgcattttaaaaagttagtccaagc

SEQ ID NO: 1055 - DNA, 254 bp, Homo sapiens
gatattttatgatttggtacaatctttactgatctcacattttcccctgtagatagtagctgcttgatttcactgatatcatggtagccactcttttttatataatcgttgttagttgaaaattagccccctgttcctgcaaggattccccctccccatttcctttagatgttacgtaacctgagctagaaataatgcagcgctgttagaatttagcaaaacaactctaggatgtgtgtttacgcagaatgtat

SEQ ID NO: 1056 - DNA, 468 bp, Homo sapiens
taaactgtgcctgggaatttgcattccagaagagaaggatattgaactagaaggataggtttgcaagtgaatactgtattaagatgtgaatttgtgggtggcagtgctcttgtatttgtccctgttttcatctccagccaggtggctaaacccgttgcatattcctgcccctgggattgtttgttgggttggagggtgggtgggagcagaagctggggtctctggcaggagtcaaagggagtggtaacatttcagaggggatgaggttttggtttaggagatcacagcattcccagaggtatcatgcttcaaacgcagtggagcttccacatctgaagggacagcgaggccaggcagcagcccagggagtgcctggcaacccctggggtatttgtgtggggaaccagtaattactgagacggaatttctcagcaccctgaggaatgagcttctgaggcagaaacaaat

SEQ ID NO: 1057 - DNA, 306 bp, Homo sapiens
gtgaatatttcttgtgtccctggattggtgggcttcaattcacatccacccaccacatttggtccatctctggaatggcaaagaatatttacatcacacacaactgcaccccatggtctgatgatgacgcccattggagatttgctgagcagaaataaggctctcagaagccgctgttgggaaggggatgaagacgaagctgagtttgaagagcagcctgaatgctctcacccactggtcagatgtgagggtcaccagaatggagaggaggtaaatcacttattccacagtgttgagattcttccg

SEQ ID NO: 1058 - DNA, 1605 bp, Homo sapiens
atttcccaggcaaaataccctatgactgagagagaagaacctgaatcctggcattcaagaatattcctacagtggcccagcctggtcatgccatgtaaggcctaggccaatgcattgccccacctgtggggaaggctgttttgtcatggtggaaatgaacccactggaaacaatgggtgttttggggagaatgaagctcccacttggccccagtagaagagcattcgagtcttgctggggcccatttctgagatgcaccagaagttaatcaactttttagtgtcagaagacgcttatttgatccctggggcccatttttgagatgcaccagatcagaggctgagaaactgcagagctcagtgacatcacaagggtgaggccctcgggccccagggctttcagagcacaggaaggttcagtgctgagtctgactactcagagctccagagtaggctttcttgatgctgcaaccatcaccagcacacagtgggctgccgaaaagtgtctgcacctacccagtgaggacagggtgcaggggctcgtcctcagtgctagacttcacaagccagggctgtgtcttcagaaccggtgtggacaaacctgagtggcatatcccattccaagctctatctgacagaccctcaccctcacacctgctcccaaccacagacgctgtaaaggctgggtactaacgggtgacggaaaccagtcaaagagaaaagctgattttggtggctcgcacccaggccttgctgttcaggccagcacatgctgacatgtcaccaaagctaattatcctgaaggaccctcccaaactcctgggaaatgggcttttgattctgggtcccaagagtgagggtctaccctctgccctttgtgggaggcgggggcctaccggtggggggcacggtgaggttagccaggcataccgtccttggggattggtcctgacaaggccactgggacatgtggggagacatgggacatttcacagggtgttcagccatcaagaaatcttgcagttgatgttaatggctgaggagtgcttgggggcaggaatccagggtgggcctaagagtagttggtagtacaccactggtgctccttcctaggggagactgctgccctctctgtgtgtgctttcatgtggagtggggaaggtggtgcttgtgccggctgggcagtggagcatttcagacaaagaggcatgtgttgaggggttcagaggtgagaaggggcagcaggcaggagacctcaattaaatgtaaaaagcctcaagaaattgtaagcacaggagagcagtggtcagatgagggttagatagctcagcagggagaaggagtacatttggacttgatgcggaattccttggcagattagaggcttatagagaggggtctgggtgctccatccagggcgtcctttgtgggccatgggtgctgtgctgtgggagtcactatctgtggctgtggggccttcaactgaccttcagtcttgcctactcgctgcctctcccagaggcacggatacaacagggagcctccctgtggactggcttttctccccaagccgtggggacccatggggtcttctgggaggcagtgg

SEQ ID NO: 1059 - DNA, 452 bp, Homo sapiens
agaaagctgaacagactggccctggtaggtgctcagacacttggctgttttaattattcctagtacaggcaaacctgcccccaccaccccacgcttgtggagactttgctgggtttattggccctcctctgcccccagtcctctctacactttattttgctgaaattcacttcaacagggggatgttcagccaagacaggacagaagctggtgctcctgacttttttggatttgcttcagctggatacaatgttttgggttgaccatttaattcagatttcctagttctcacacaccttggaggatttttccccggaaatactacgaaagtggtaacttcgcctcgtgtagagagactgctcaatgaataaattaagctagattagaacagctgggtttcaccaagcccaaggggcccaggaacagaattcaaaggatcagtgaactagagg

SEQ ID NO: 1060 - DNA, 1194 bp, Homo sapiens
cggaagaagtccataggcttcttctgacactaaaaaattgataaacttctagacattggagaactggaaggataaagtggcaattcccagtttagccacaagagggaactatttcacaacttatgtttagaaagatcatagctgggatttttcttatttcctcttaactcgttctaaaattggttcgaattttcttctttactgttagcagtgtaattggggtgctgtgatgaggctctgtagcggataccccgccaagagctgaagcatccctgtctcatgaacccaggaagacgtgatatgaaaaagtgagtctcccaggcactagatgagaatgccaagtttagtgccccagcttgtttgctgtcttccccctgccccctgaaaccttgtagagcagagacgatacctccttttttattctcataggaacagttccttcttcaggttagaaacacagctgaaggttttccacgaatacagtggctgttagaagaatgtgttgtttgtgtgtatgtgtgggaagggggcagaggcagggttggcgtgggagggagggaaatgagagctttagaggtggagagaggctgtgatcctataataaaaacccgaggacctggccaggccttccacttggttatgcagtggttgcccctagggctgattttaatgggaacaatttcacacgttcccttgtcgtttggccacatcagcacttaggtcaccgtatatatttaagtgcacagaattgaggtcttagagtgtctaattgcaaagggcggcagccactttcacaagtcagcatcctacggaggagtagctctgcagtccctcacttgccctgaagtaggtcaggctggagtaaatgcagcagatgtccacgtgggcgcagtcgcggccacagaacacagttctgagttcaaacctacttgtgactccaaaattaacatttgttacactgtctgcctctctggcctttagggattgttgcctgttttttttgtcccccaatgttagttatgagcaacattgaacaactcactgttgaaagcagggctttacaggctccatcctaaatgctggggccaggagagaaccagccgtaagtgctgtggatccctagagctcacaggatgcttggcacgtgttgggtaaatacaacccctctgaatacggtcctttcaggtgtgtcta

SEQ ID NO: 1061 - DNA, 1654 bp, Homo sapiens
aatgataatgaagggttggtggagtgatgaggaggtagctgttggtagtgtaggttggaaaatgatgatggaatagttggttggtggtggtgatggagccgtaggggcagcagttggtggtggcaggctctggcagtggtgacaagataggaggagcagcgcttctctctgactccttggaggccatccttgctgtgaccaccatggtagtgccaacttcaagaactaggtttgtgcctgattctagctctgcaggactcctggctattctcccagagggccctggtgcttcctccgcctgggtcagtcctgggtgtgctggaattctaagctgcaagatcaatttctgcttgtggtctcagaacttgtttcatttatttatggacatgcccacacttgattttatagtcttgcctcatactccattttttttctttgagaaaccacaggcactttaaagatattgtacaaatatttcttataacaactttttgatgctggggtcaggtaacagaaccttgctttataggtgacaaaattgaggtgattctccaggttacatgtttcttaaaccattgagaagtgacatctcgtttacaacccttcctgtggctggtagaattaatttttgttggaaaaaaaggtcattttgttatatttaaacctcccctcaactatgaaaaaagagagctgtttcttttcttttttcagagagcccactgggcgccttgttcctgtgtatttgtccatgaccctaattctttactgacgtgagcgaggtaccaggagtgggggctgcagagtgaggacacgggagtggacgtaaagttttcatttgaagcttcagtgaatggggtctgtacaacccttgtcatccaagggagccattttggagagaaaaaacaaaacaaaacaaaaaaacttctgttatttttgaccacttaaaaaatatttgcttcacatttggtaaaactgagaaaaatcacattttccttagtgaaagcagctgcagtttcttccatagcacctttgaagatgggatgggaggggagccagggatggtgcactgttggtgcatgggccagggcaagtgcaggttgcctttaagcagatgtgttttaactgaaaaaggaataaaagggtacacttcaggacatacttatccccaaaaggctgcttcctaaaaatgctaattgtgcatgttaaacagaaaccataggctcctgacagcctcacagagtcctgtttgtggatgttttatggaggtgatttaaaccctaggactcttcctttcttccctctcgtgaaggatcttggtgttaccaactcattagctcgtgttcctgttatttgcctgcagttgcagtcctctgctttcaataaacgggcctagcactgtcaggggatgttgaagtcacggaggtggccacactggataatcaacagtgatgacaactttgcaaatttaagaacagcacacgaggcagaaatgagaagccgcatgaagtgctgatgaagagcaactttctaatatcctcctcctgtggttccacatgagatgtgagctgtgaaggaaagagagttatgaaccaattggtgctttgaattgagattctcagagtccacccatgctgctttgtgtggagtcttgggg

SEQ ID NO: 1062 - DNA, 293 bp, Homo sapiens
tgaaaactctcaaggctgcttccccatcacccctccacctctgggcactgaaggatgagtaggagtttcccagatcggaaggtcaaaaagggatgggcatatgaggcaagaaggcatatctggagtaggcctggggaggtaccgagtatcccagtaggctgagggacaccagaagtaaggacgtgggtgagaaccagggggtgtaagcccaaggagtcagacagggccctatggtgggggcctctggggcttgctaaggagcttagatggaatcctctggccatattaatctg

SEQ ID NO: 1063 - DNA, 166 bp, Homo sapiens
tggaatatcggttaatgaattggacctctttttccttgcaaaccccaccctcatgcacccaatatagtgccatcaaagacaagaagaaaagctacatgaggaagggatatccttctaggagtccagatgtcctgcccttacagtagcttttggaatactatagtca

SEQ ID NO: 1064 - DNA, 415 bp, Homo sapiens
tgtccttgtcatctataactttcccagattagttcttctataaccctagtgaaccctgggcctccacatggctcagtctctgcagagttctccatatacaaaaacaaaacaaaattcagcagccagaagtacttgagaaggaattccatttgctgcatgactctgttgaacttcgaggggataagagtcaccagccacagttccacttttcaaggacccttgcctctactcctcagctcctccggatggtctcttgtgccagcacccaagctgctcctgtaaccacaatccagagctgatttttctcttgcttcttccttcctcatctagttctttattaaagagattgacctggcctctctgcgcatatcctccctaccttcttcctgtctctcaggactcatctcccctcttt

SEQ ID NO: 1065 - DNA, 837 bp, Homo sapiens
ctcatcttataacttttgcatcacaaaaatctgggagctgacttggcaaaaacagggtttctttccatgttgggttggggaataggagtttattaagcaaagttatttacagatgaataaatattagcctaaatgagtatgattgattctagagcacattgattttgttttcatgttgcaaatttttagcctttaaaaatagaaatttaaatgggcatttaggacatattgcctataggaagctaaacactttttcttaatgcattatattcaagattagggctttgctctgagattcccaattccaggaagaaaagtttctaaatacattctacttggaaaaattatagttgttttctcttgtgcactaaaataaaatcagtacagagaaaaaaaccccaccaagcttttggtactacaatttcaattctcatctttgtcaatgtgcacataggcatttagtgttattataatgaatgcatatcagttgattgtaatctgttcttttccatttaatattattttatagcatgattttataaacatacagttcatatagttatttttagtaactatatattttgagatatcataattggcttagtcatgctcctttgaccagtggtaatttcaaaaatatttaacaactgatattcatattgatcaatcagaacactctaggctatagaaacagagtatgtcctggaggtctctgtaggacctgacattaattcatttgttgctggattgtagggtagattgttggtggttgggaggttgggtagggaatatttactaactgatatggaagaaatgtaactattttcttaattaaaa

SEQ ID NO: 1066 - DNA, 399 bp, Homo sapiens
tgctgtcgcataccagggtggctggctgactattggctctgttgcaaattaagcatttataatttgcatttttcgacattatgtatagcagtttcatgaacatcatattcttcttgaagactgccattcctggcattagaaaaatacttactaatggaacaggtttagaagacctttagtcattcaggaaccatttattcagcacccctctgcactaactgaagagacagcataagcagcagatatatttgtttggagtctagaagggaagatacacagcagtgaacagcacaatgtggaatgtggtttctgttttggtcatagtgtgtgtgaaggggtttgggagcaaagggagggactacccagagggacgggtgtgggtaaggaaagtgtagttta

SEQ ID NO: 1067 - DNA, 418 bp, Homo sapiens
cttgtgtaaagcaaggcttccagtactaatggcaaagtttagttttgaaaaatgagttagtcaaggaatgtggtgagcagtgaatttcaggaaccacaaggtatttcatcccagataatgaggttagagagcaagccacagtgagatggcagtgaaaagcagggcagggtcccaaattccttcagcctgttcttgttggaggcaatgcagggtcactgacaggtacacatttcattgtgtagggttggtgctgaagacaggggccccatccagtgcaggctgtttgactccttgcagtaagtacttttctaatgccaagaatggtaaagtcatctggttccggggcaagaacctggaaccagagaagggatttcttttcttactgaacacagcttggttatctgtgaagtcacactag

SEQ ID NO: 1068 - DNA, 297 bp, Homo sapiens
tgtggtggccttgctatcagttatttagttttccaaacattattttgttgaaaaaaaaaaaccatttcttactgacttaaagtgtaaccctgaccatatgtgatgtgtttatctatttatgcagactcacatgggcctctttgtgggctttacattctgttcctttcatgtatttattctttcatgtgtcctgccctattattttaattactataatatggtaacatatcataatgtctcaaattgctttttaaaatgagatgtttgttgaaaagctttctttgcccatgtaaagga

SEQ ID NO: 1069 - DNA, 208 bp, Homo sapiens
taaagactgagatacatatatctatcacatcaacaaagcatctgtcattagcagtgtctgctacaaccaactgcttacggtagctaagtatctgcttttttttctatgtggaacataataattcctgccccaaggggagttccatttaggtcctgcctctgaccaaaggccagttctgcccatgaagtccaaataggcttcctttggt

SEQ ID NO: 1070 - DNA, 485 bp, Homo sapiens
gagattacagtgagctctaatggcaaagattcccttttctggctgtagaacacatttcatggtggggctacttggatctcctgtttctgttctctgggaaaaatgccctgttcattatctactggtgtccctgcctctgcccaagggaactttcttccttgtcttttattgctcatggccataaaaatactgcactatcagtcaacttaggttttcagccacagacagaaagtacctctcttagcaaaattattttcccttccatctctgtttctgatgggctggctctagactgaggtcatctgtcttgtagagttgcatgaaagaaaacaaaaaagcagctaatgcccaccaaaactaagattttctcctaatgcttcagcctcctttggcaggttgtcttcaagataccacctgtgagggtttaactcacccatgagctttgtatggagtaagagtcaccagattatcagcctgtggtactg

SEQ ID NO: 1071 - DNA, 528 bp, Homo sapiens
tttggtgcatccatgctctgctctgctctgtctgtacagctgtaattcttctaggcatgaaaggggtgcgcctctcactggagctaaggcctgttataatcttgagtttgcacagtgtctaggatgtggggatggcaccttttagtctctgtggcctctccatcctgtggtgtccaggagccctttcttaggacctgtgtggaatctgtcactttcagccttgtgttataggcttctatgtctgtcttctattctctgctggctcaagcctcctgtgaccagtcactccttcctcatacacagagtgagcactctttcactaccaggtactgaagtcacagggtgggaggggcctagtgctgtgctacaggatttcccagtctggaagggagaggctttttatggaaacagatctgtgacatgggaatgagtgtcatggatgattctacaacgtgttggggctcagagacctgggagatgctgctatgaggtgttgatgaacgagttgagtcttgaagcaagattaag

SEQ ID NO: 1072 - DNA, 235 bp, Homo sapiens
cttgtgagaagacatgagagaaagacccaatatgttcaggtgtgatgaagtattcagggctgttggagcacagggagtgggatggagtgaaatgaagcttgacagtcaaacaccttggatgtggagtgtgggttctagtttaaagactaggagtgaccagatgtctctttttaagatgggcaggacgtgatcagatttgaggtctgaacttgaatctaatttaacttattttttc

SEQ ID NO: 1073 - DNA, 1093 bp, Homo sapiens
atctttctattcatttctattaaaagaagcccttaacaatgagaatttatctatattcatggttgcttttttcctcccaatttttgtgattatcattcatgccacttctacttgcaggggcaaaatttatggagatgacactctctagggttgtacctggcttccatgagacttgagttttgcagatcacttggtgtcctctcctgagtcctgcctcctggggcctgatttccctggagttgtgattaggtgggttggagtcctgcttattggagtcctgcttcctggggcctgatttccctggagttgtgatcaggcaggttctgatgagccacctctgcactcacatgccctgttcttacacttggagggcccattggtgggttccacagcaggggtgactcttcagaacctggatggctctccttctaggtcctttcccagctattggcctacaaccagcctcagagctctcagtttccctactagctgagtgaggtatgtgagggaggaaggctgctaatcatgcacatgtgcatacgcccaaagcatggcccccgctgactctgcacttctatctgaaactgccatattcctctgcctttgtgtgacaatatcaaaggctcatgctagaatgcaaaggtgttatgacgacagtggcagtgactagatcctatagtcatttttatatttacagttgtcttcatgtaataacaactactgctctccaggcgccatctggccttatctgtctctccagactcaacttgagcctatcactgtcttccctgggctctgctctttctcagcacggggactttacacataccgtttcccgtaaaatgctcctaattctgtccttccccattcccctccgtctttgtcaggcattattacttcctgcttctgcatcagatgcattccatctgttgaatcttcaaggagcaagccctctgcaaaaccccagcctcacacccagtctgggcctcttgtcctgtagtgcaggccccaacgccatcactctggatattgtaacagctatcacagagcataattaagcttttgcttccaacatccctcgattcaaatccgg

SEQ ID NO: 1074 - DNA, 858 bp, Homo sapiens
caatacatttttaaaacatgaataaataaatgagtgagaagtttcattttgtgttagatttttaaagaaaaatagagaacatctttctgtcctttcccaccaagcctgtccctcccacccacacacaacagtcctgatggagacagttgataggacacttaggtggcttctggtgttcaggcctaccacccagagtctttttggacatgaggaactttgaattaatgaccgaggagagccctgagagcatttgcaggcagcactgggtaaagtgcacaaagcagttggtggtgccaggctgtgaggccattagtacagggaaaagggcttgcgtggagagccctggccaattaccaggagagtaggagacaggaaggtgcatccaggttcacacaagtcccagcctgctggtgtgttatctaacgtgacagactcagtgtgaccctccttccttttggaacagaaagatgtcatttagcatttttttgactcaggctggagcagcaagctgggatgagaaatcttttcttgccaactcattaaggattgggctaggccctcaggaaacctgcaaactcaggccacttagcagaaaagtcccgatggcatgtccttacctgcagagcctcttacttcttcagggcttccattttcccttctgggtaggagtacaaggaaggctgagaaaagtgagagggtggagttgagggaagaagtcaagggcacagggactgccttctgaggtctcagtgtctccccacctttctcagggacccatgtgtccacagagctttgtactctgcagctgtagccttactatgagtcaaaggtgccctgttgccgagtaggttcagtgtt

SEQ ID NO: 1075 - DNA, 293 bp, Homo sapiens
tctgggaaactcttggagatcagatgtgtaagcagttacccttaacacaaagagatatgggcaacgttagaaggattagagatcttgtgcccttgatagcagctgtacccaggagagggtggctgggctactatgtgtatcagggaagcttctagggaagaggggtgtaggcaggtttcccatgatgaatggatgcttggtggatggacaagggcattttaaacaggaaagtcacagtggtgccaaatagcatgacatattttgacaaccaccacactgctttgcgactcctg

SEQ ID NO: 1076 - DNA, 324 bp, Homo sapiens
ctgtggcagaaggtggaaggtcagagtgagggaagttaagtctagggaggtaggcatttaggccccagcccttgaagggccttgtttgccacatacagaaccatggagtattaagcacggcagccatggagtcgggaaaggctccaactggaaaggcccccattgcttttggggaggctgctttgaaaggtcaaccccagtgtctcctcattattccagttggggtccagtttccttgaattccatctttttctccaactagagtgtcaagatctgatgggggcagaggctgttctatttactcctccttggtctcttcagtgg

SEQ ID NO: 1077 - DNA, 341 bp, Homo sapiens
taagaactaactaccaaacaaaagtaaaattgcagtagaggtaagttctacaaaagagggggtgcatggcattgtacgcctctctaatgcggcaatttgatacagttaggaggccagggaaggctttgctgagtgctgagatatggagagtaaatgttactaggcaaaggctgagggtaagggaagggtgtggtgagacagctgtaaccataccctggtgggaggcagaatgtgggatataaaggactgaaaggagaggctggagggcagagagtaaggagttgcctgtacagcatggggctggggagggtggcaggactcgatcacacagagccctctcc

SEQ ID NO: 1078 - DNA, 891 bp, Homo sapiens
gagacaagttgctagctttcctcattaggtccagcaggagattgtctgcctaatggaacaggcaatgaagcctgcagatactttcttaaattgagtttttgactgaggactatggaagctgtagagtctttgcagggattaggaattccaagacttttggaggctttgcccatggttgctggagctactcatactcagagctgaatgctgcccagtggctgacgacttcccctgaagattcacctgcatctttgcatccttttctagggacagctgcaggtgggcaatgggtggacccatgtgtgcgaggaatgctctattgtggagatctgaattatcacttatccagcatcttcctgggtgatcttgagccatttgtccaatcctcacactttactgtagccccctgtgaagtggggtcacttctgttgcttcttgcttccccgtgctccagtgctgtgtggtggaagaattgggtcatatgtcgttaccccaagtgaaatgatcattataattttttgtcctagacatttttccattatatatttgaaccgtttaaaacagcacagcatcctaagatggtgattgggatgatgatggctgaacttggcaatgagaatatgaaacttgggatttggtgaggatttaaaactcagttcaagcagtttcagtctgtgctccagggatccctaagggtatctgagatgccttgggggaaccaagatggggataagagaggacaggcaggtgggattcaggcccattgggcctgtgggagcatcttccttgtatattggagcatcttttttatatactgagattccctacaatataatgtgaagaaagaaagaaattttgaaaatgactgatttaatccaactctcttatccc

SEQ ID NO: 1079 - DNA, 664 bp, Homo sapiens
agtatacagttttttaaaacagtttgattaaatacttacaaagtcatgcatattatcatttatgtatgtatataaaataccatgcttatacatgggtcatgcattatttcttctaattatgtccccttctccccacttttccaccaacctcaaatgttgaatttgtttgccctgaaaggtgtttggggaagggtgctttggatttttacaatttggaaactctttttcacttttctggcataagaagtacaaagtaaattgaataggcctatgaagatgttgagtgtttttcatatgcagagaattgaaccccaaaagaaaatggtctaatggggttaataaaggtcagcattcctcagggaactgggaaattaatctaatggctcaaacctctgaggggttaatggaaactgtaaagcaacagctctgcctattgcaacgactataaatagctcaaagtcctgaaccacctcccgaagctgtgatatcctccatattaacttcagcagctttatgccgggctaggctacaacctgaatttattccagctgcatccagaagacccttgcaatatttttcagccatgaccaaaagagtgggagatggatggaaggctgactggttgtgaattatgtgccaagtcccctcagagtgaatggtaagg

SEQ ID NO: 1080 - DNA, 1265 bp, Homo sapiens
agatcatcacatagagaatgatgagagaggtctgggagcaggtaggaagagtccatcacctaaggaaactggatcctgtgtataagagggtgggcattcctggaccaaaagttgggctggagatggggctgctggggagacttggctgctgggagactctgataggcaggtttagagcccacaggaaagagggaagttgagaaaggaaaaatgctgcagaagatcagaaagcaagcaaaaattaagggataggaaagaaaccagtgatttttatcaacaagacatggaagggaaagaatgatgtaagccaaacaaatgtagagaaacagaacatatagttctccctgtgaaacacttttaagctgcaaagtgtaaagagatgttatttttgtatttgtgacattttaggcttccgctacttgcaatttaaaatgaaaaaaagaaaatcccaaatcaacctaacttatttcttaccaagttaaggaaaatgacagaggaagggcacaatgcttagctgctaattgccattctttgacaacccacgaagactatcctcagcttatttaaaataagcatgttctcaactctttacttttcatcactgacatcactgttgaggaaaacgtggtgagaaaagatgaagaaaacacattagaaatcaggaatcagagcaagtttaagaaaattatcatcatcatgaagagaaggccctgggactgaaagggcagctcagggcacccttcagaggcaggggtggggtcacctggggggttccctgggctttgcagctcctctattccaagtcccttttccccagaggagtggtggggctctctgcagggctaaaccctgcaatctggctcttctctttgaggttctgattgattttggatttaattttgtcttgcaggcttttctgatatatctccaagcaggaaacaatattatttttcttttcttctctgtcaaaagggggcaggaccttataataatttttctttgtgaaagaggatgaattgagatatttgcagggtaggaacgaataaaaaaagatcataaataaaaggatctcagtagggcctaaggagtgaaccccaaactataatgggtagctactacaatcaaattaacagctcctcttcccaaccaaagatttcagctgcctcaccactgccccgtccccaactaaacactattcctaaaccttcaagtgaatcagttcaaacccaaactggaaactatatgctatctaatgctattggatt

SEQ ID NO: 1081 - DNA, 440 bp, Homo sapiens
agggcagtaacttagacatctaattcttcttgggagaggaccctccttggctccacaaagctgcacggtgtggccacagtttttgtcttgctgtatcgaccccctaagtagaaggcaggtagatcaagatggaatctacacttccgcagggtgacctctgcacatagattttctgttgttagactttaaaggagcatcctcctcccctcttggctctgtgttgtcatgtacaggatataatagactcttgcaaggggcgaatgaaactgctctctttggaagctgagttgagtaagattgatttttagatggcagctccttctcagacaggcttaaaataaaaacggtcgagatgagtttgtgagtaggaattggaaaccagacttcagagtaccttgcaaagactgaactcctttgtgttagatgctcacttgattcat

SEQ ID NO: 1082 - DNA, 1300 bp, Homo sapiens
ctcaagaatttcctttaggcagcaaggacccactttccaggggcgggtaggttgagggctggaagagtgaggaggctgtcatgttctgctgaatgatctttattgctgagaacaatttcttgctttcacccccatttcatattccagctcttattttttttaaaggagaatatgaatttgagagtatttcctcttttctccctcattcttcctctttgaatgtgatgatatcactatcataatcttcatggttgacatttttcagtgactcaccaccttactattttggtggttgtacatttcaacagataattgtctttccctctctcctgagcatgacacctactcacatctagagacttccaacacaacaaagcctcaccaagtagcaactcactgaacctggtagtgaaagtgagaggtacttatgaatgaaagacagtaagtgaagttgtggatgagaagacaggcctgctccaccaggcatgaactgttagtcctaaaagtcaccccgaggctcagcattccttagactaggacaaaagggaaatctcttgggaaatgaagaccactatccttgaaactaagcatggcataggtgctctaagtggattgaagccctcagggtgcttcatcgagacacccctgagggagagggggagcttctgagaaggaaattccgagagcatagtgttctggggtttggtcatgtttttaatgggtcagaggagttcctctgtctctgggaaatgtctccatttatgttgtgggtctccccacaggcaacattcaaattggcttggtcaactgagactctggctagaactgacttccccgctgacctgtcctgctttaagccatcgtaagtgacttctactgcccctgactcccttggtaataatattctctggggtttacatggtaacgttaaacatacctgctcatggtatttatttaatgatgattttaaattcttattgagcttgtaacacactgaaattttgtgtattacttctctgttttggcaccttgactgatgtactagctttatcatatctgtaaaactgccccatgtacatattaagaggtttttgtcattttgtgaggataagggactcttcaatgagtagggaatcactaatttataaaaccagaagctcagcctcctaaaccataaagactttgtcttagagagaccataaaatactgataggtcacaaaaggttaagtccttttttattatttaactttcctgacatttatgacttgtcttccaggtaaaacggtgtgcattttgtaa

SEQ ID NO: 1083 - DNA, 449 bp, Homo sapiens
cgtagagttcatgtacatcagttgtcaaagggcagatgtctggcacattggaaatattaccgaatgttagttatccgtgaatcgggggactgattttataaccacccaaatcatatttatttcctagaggaatgaagatgaaaatagtggtggttagtgtctagcatcgcactatgtttgccaagattaatttgcaatgagccgttttcaaacaggatgttcagccactatatgtacttcttgaagtaaccagcaggtggtgaagttggattatattttagatggtcagggcctggtgtacctcttgcctggggttttgtgagagaaaaaaaatagctttcttttttatcagcaccccaaaccattaacatctggaatcaatagaggctgtatctgtcacttaatgctatagaaattgcaagaaaaaagtcctgctggttagtatacca

SEQ ID NO: 1084 - DNA, 519 bp, Homo sapiens
cactgcgattctacttcgcaatgacatgtagtggcaaattggggacccaagaagcaactgatggcacagtcttaataaggtaatttaacgggcatttcctgaaaataggctatttataggaatgtgaatgtgtagtaacgcaaggaagagtgaagtaaccacagaaaacagcctgagttgccttccctgtgagaaggatcccttcaactctagacctaagggagcaagaaaggagaatttaggagagagtcaagttggggagtccttgacaggagcaatgaccttatctcaaagtcctcatccagcctgaggtcaagccaggggggatgtcaggggactccttcccctctccccatcattgtcttctctccctgagaccttgaactggcaccccccattggctgagaccatccgggtatacaggaaccctaaaatctttacaggtaggctttaccagtctacatagggtattaaagagcagaatatgagtttggggagcaaaaggaagacatcctgttc

SEQ ID NO: 1085 - DNA, 621 bp, Homo sapiens
aatgggaaaatctgtggagttattgctaggaatggtaatggtgaaatcattaaaacacagaccccaattcagagtcaaattcagctgtgttgatgcccttggatctgattaaaagagcttccttcttatttgagtaggggaagtggattctggaagacaatagaatatggacatggaaaggcatccctgagtgcctgaggagggggcttctgggggaagagcctggcagtgatgcctggagagtcagggtcacacccctggcccaggcagagggcactgctcaaaacaccttgtacctccccaggcaaggtccttgtaacccatgacctcagagcattgagtactttagctcagcttcatctgtgatagagaggagacagctcagcctgtctcctgtgaggggaagatttctgtgtgtctgaaggaaaagttctctgcactcgcccaatgcacagcacttcacagctgccctcaccccagcatcgcaatcctctcaactcctgccctgtatcagcctctcccctccccaaacagacaggcagccaggagtaaggccatggtggttgactcaagcatctctcttcccaggctgaagttccacaggtcttgctctaccagcta

SEQ ID NO: 1086 - DNA, 403 bp, Homo sapiens
actaacacaaaactcaagttggaacacaatggttgcacattaaatcattatgtaatgcaaagagctggcctagaagatggtaataaaatggcttacatagtccctgtcgtgctggaaaagtggtatttataagcaagagctaagcttgcctttaaatttgtcaagctttggaattgagttactgtttctggacatgtgtcacacctatacattgagatgatattctctttgcctggcaaaataacgaataagcaattgtaaagtcttttgatttttgtagggaactatcataagccttcctgatcctccctaatcagcaggctaagtcagtttgctgccatacatagaaggagcaggttttggaagagacagttgccagctctgccggtttttatgttagtgt

SEQ ID NO: 1087 - DNA, 465 bp, Homo sapiens
aagatgcattagaaacattttatttccatcatccccaaagctcctcttgacctgaaattctatgattctaatatctacgtcatgtagaatggctggttctttagaggacagtaacaacatttttctagttttgacttaggattttggataaggcaaattctacttcctgttacctctggagacatacgcagtcattcagttatctctcttgcctttgaactgggtatacatattcagttggattatttatctctggatttgaaaggattgcatttaattttgaatcaaggggaaagtgatcgtggtgttctgagtcactagtgaagccagttacaagccagcctcaaagcaagcacagtcttgcactgattaggaaacgttgagagaagatggcagccagaaatatttgaagctttaacaccaaacagttgtgacagcaaaggtctccaatttttgcttttcatc

SEQ ID NO: 1088 - DNA, 1255 bp, Homo sapiens
agagctctaagtactggcaaggtaatatcataaaagtaaaatattgaattaaaaggaaattacaggaaaatatatgcagaataaaatctgcaaacagtatcataaaactgatcatgaacatattcatatattgcaaaaatatcatacaagcttgaaatagtgaataccaaattcttgaattcagaatggctgttgtttctggataaggaggaacaaagatgggtttgctgaaaagaaggcagtgcaattcaactgcatctgggatgtgatttttatgaacgtgttggggcatgaatgaccaatgccaagatttgacaaagctggatggtggctgcttttttgtatgcttgaaatgtttcataattgtaaaaaaatcccattttattacttgttttgccttctctcctctttttgtcttcatctgtttcatagtttcaacagacttagcaccttatgtctaggtgtacgttttgaggggacagcaattttttgtgctacaaactttctgtaagaggtcttggacttagggattccagttctcagtgttagaccttgttttctgctgggttcagatgagaggtcatacagtgcaagctggggcccaagttgagttaattatttaataaggcttccacttagtctgtgtaaactccacgagctctcctgatggccaactcattcacactccttggcccacagagggttcagaagggccaggaggtgagacagttggtgagaacaaacggcatccttccctgctgtttatcagtgtttctgctgcttgctcaagtaatcaacagcataggtagggcttaaagaggaaatccggtgcctgcagaattatgactgacctattgaggaaaggttcagagaggctggggagtttgtgaccttccggttaaagtgtgacttcaaccaaggcagaccaggagggtgggtgaggcatccagttcatagatgagatcagtgtcaacgggtacaaatccagcagggtgactccatgcgtgtgtgtgtatatgtgaataacacaaagcatgtcatgaaatagatgcattaaatctgaagtatgtaatgttgtatataatgtcttaaaagttcccaattcagcacaccatgaaatgtctaaccatgacaattaaacaatgaaatggctcgacaggaagggcttttgcattccttacagaacttacattccaaaaaagccaggtggagacataaaacaatccttcctcatagatggtttgtgttgtgttgg

SEQ ID NO: 1089 - DNA, 678 bp, Homo sapiens
gctcaataaaaattatcattactgttattattttattaatttcatttgtaaagcaagtcttctatgtaaccttccagtgaaatcaggaaagaccctactgtcataatttaaaacaagttttgtaaaacttaattttcattcctttatcattggtaacattcacatggttcaaaagttactaaggctatcttccccagggccttccatggaggccttcactgtgttatgcctttttaaagtgtgtagattaggaatatgcaaacaaacaagcacatacatgtaccaggtagttacttactaagtagactatgtgagcactttgctttttttggtcacttaatgtttctgggagatatttcctttttgttacataagaggtgaagtcattcttttgtatgactgtgttgtttgacaaatggattcttttgattttttgacttttctttcagtcttcttttgcagtggaatacctaggagttgtgttgtatttcttcattttactcatttatttttcttgtctgtgcctcttgcactagctgagccttgattccatcatgatcgagggattccaccaaattcactatttgagaagccctgtggtgtgatgcatatcagggtatatgccccaggaaggtgagtttcataatcaacgttgctgattacaatcaatgtttcata

SEQ ID NO: 1090 - DNA, 675 bp, Homo sapiens
gtatgtacaggatggattggaagttaagtccagcaaaaagtcccagtgctggttctgccccaaagacgggtttggggaatattgttctagacagaggtacaagaggacagctgctttggaggaactggaagaggtttagtgtgatatgggggcctagggtatgagaatgcaagtagtaggctgtaacctggaacagaaagtaaggcgggcaggttgccacctgattgagaaatttagaccttgtgcaagtggctatggaaatccactgagggaacttaattgatgtttttaggcacgaggcccttgtgtttagaaattcattataaccctcctgtgtagttgggtttccctgttacctgcagtctattttcaaagccaggtaagagttgaggaagtagcaagattatgaattcccctaagggtttactgtttatccagtggtttgcttgattcctccatgggcttctcccatgacggcccctcctctctgaggtggtgcttgtgagggtttgtacctcctctggctacaaaccctcattcacacccacctgtctattcctgttggtagataagccctggctctagcttgggactcaggcctcatgcatctccttttaaaacaaatgctcttagtgttttccacataccataatgctttgaaaaaaaaattcaata

SEQ ID NO: 1091 - DNA, 482 bp, Homo sapiens
gctgacttcaggagcggctcccacagtcatacaaaacctaatctcataaaataccccttcaaactcactcatcctggtcctgcttccctgaccaaatcctgaggatgagactggatttaagtatttctcaaccttggagcttcttgggctttgctattgcaaatgttaagtaagaatattaattttaaaggcatgtttatcaaaataactgatcaactcagctattttaataccagcgattctcacctaaacatacggaattgttttcaaatgggtgaatatgtttctcttcaagttttatagatgtttggtaagaaagcaagtttttcttttttaaattgtttgcctaagagggatataaggaaatgtctgtgttcgattttgcaatatgtgtgcgaaatgactttgcagtgagtcgtggaggtgatgaagttcagctggcaatcattggcagaccccgccgcccccccgccacccccact

SEQ ID NO: 1092 - DNA, 450 bp, Homo sapiens
gaaagcaaagaaggaatagggtgatctctttgtgttgcaagtgatggtggggggaatggtgggtgggtggcgggggggactctgactgatcttcccgatcccctcagtttcgttactctgttgacagtgggaattctgaggggcttctcaagggaaaaacataaaacctgacctttgtgtaattctaaagcaagaccttaatgaaaacttgcttttaataatgaagaatgacagtatcaaaagtcaggaagcttctccatagacgttgcaactaaaatatatatcagtgaagatgcttgttgctaataggcgggaacacaaaacaaaatctaatgtacagaatgaatttcctctttggactcctggcgagtgaaaggtaagtagatgctagaggcattgagctctgtcgattgcttaggccgcatatttcaggactgacatgtattagct

SEQ ID NO: 1093 - DNA, 618 bp, Homo sapiens
gctctgaacagaaggcgagtgtctagacagtgtcttcctgtcttataggtgccctggtggcatctgtagacatatctgtagtccaacagggctaagttcttacagatcaggttagaatattaatttagtgatatagctcatataagaaaataagaattttttaatcagttgggtcctggacatcgtgactggcaatgtcagtctggaaaccgaagatgtcaccaggaagaaaggacaaagatgtgtgagggatggagcagggaatagactgattttttttttttatggaaaagaataaaagaggatgaaatagaagaacaaaagattcagacatgcaaatcatagtattctagagaaatttctaggcccagaaatcatgaggaaaataatgttagtttctttttccaccctttccaatgagatttttcatgagggtaggaaagtacttctcttatagaattttacagctgaatagaactaaagagacctttagttttcaagttaaaacatttttttttaaagtaaataaaataagaactgcagtgaagaaatgactggtccatagccatggcacatatgaaaattccaaatgtgtatgaggtaaagctagggctttgc

SEQ ID NO: 1094 - DNA, 965 bp, Homo sapiens
gcattaaagaatcttccagcatcccacacattttctgacaaggtagttctcacctcacttcctgtcaatgtttacctaagtaaggaatgcttagtgtgatcattttcttaactctttatcctgaagaaggaccttcagtaaagacaatattttaatattttacttcggtttcctatattttactttggttgcctccattattcaccaatttgtgcttgttcagccagaaattcaggaaccacaggaaagctgttgactaaagaaaaccttaaactttcatcccagttctgttcactgttttttattaaagagttttctttttatagtaaactaaagagaggatgttcagagtccaggttcatgagctgcagggctttttttttttttttttttttttttgctcagcagaaccccaaaaatagaattgcaaaaatacaatttggtaaatctttaatgcccaaatactactccttcccctaactaagtcagccactggaaccatttctgcctctgcacatgacactgaccaggaggctaagcccattatttatgcacggctgattttatttctcaattcattttgagcatctttaatgcaaaacaacaagaaaaacagcagcaaaacacccagcctgattataagccttttctcctgacttttaatgcaaacttgaagaatgagccagagatgactcataaactcatgaacttcagtttctggtgaagaccatcatttaagacaaagtcagttccccagactgtgggtttccctatttagtgaacaaacatgtttactttaaaatgctaatcaaaaaagtccttgaacagacattgtcttccccaaaattactaaaatagttaccatgtttcaaattatttagaataggaaactaaattataataaaataattgaggatagaaatctaactgatttttcacctattaaaatttgggtcacaaattat

SEQ ID NO: 1095 - DNA, 1355 bp, Homo sapiens
cctgtgtacaaattcaagactttgagctcagttagtctggagagctagcagattcttaacctttgaatccccagctaaaaaccctgtcctgacgaacgttcatgcacattttgacggcctttcagagatgctcaggccttctctgcctcccttactccccaggctaaggtcctctactctagaaaacacctaaaggaacctggggatgtgagttacatatgaaaaccactttagtcctcctaaggacaccatacatattttctgagccatggcaaaatcaataggtaaacaggtattgttagagggaactaggcctggttcctttttcaatggggtttgaaagttgtattttgtttattaggaaggaaagaagtggacctttccagtgggtgattcatcatctggttccttcaggggaagagagggagtgactagagaggattgatgtccagcctggggcctgctttgctcaacagggacctcatgaaggcaggcttcttcctcctgacatttccagcactcctcacgggcactctggagagggatctctgaatcatcgctgtgtctagacacatcaaagggcaagctgcctgtttctcaggctcaccaaacccagtcaggagcactaacgtggcaggtctccctctgaatcactcagaccagagggagggcgctgagaggtgagcaggttcacccggctgtattcgctcttgggcgagggcaacattcctccctggggaatgcaaagtcatgttgcctcttgccaaagccagtcaggtaaggagacactgttgattttgtctctgcttcctggtgccagagcagaccaagcagggctttgaagatgttgattagacgtaagccttgacgaggaatgtgactgtcattcaacagtgtaggcactcagtaaatacccggggcatgaattcaagggaacgctaccttgcaaaatgggccactcacttcagacaagtaattgaaagaaacatttaaaaattccaagagcaggaaagataaaataattgctttgggttgctcttcggaagcctaatgcaacatacagttaagttttagacttcctgactattcttcacaaatttcttttcttcaaactcatgttgttcttatatctgaatgttctactgcatactctaatagatttgatttcaaccacatcccacacaaaatcatatttacacacacacacacacatacatatacacatatgtatatgtatgcagttgattatggacatagttttctgctttgcagatactttattaaacatctattatatgtgatattgatatttccttttcacatgttagaaatattttgttttccggtctcaacca

SEQ ID NO: 1096 - DNA, 485 bp, Homo sapiens
aggtcttaaccatttttgtaggccctgtgaaattctgatcctgaattaaatagccctaagattgtagaaatgaataacctttaatggagtgtatgctttttatggcctcatcaataaatgaatttattcctgacgttcttctaaggctaatcactccaaaggatttcagagtttatctacttgaggttatttacttgatacattgaggtggttccatcctgtaactggttaagtggatagtgtactgtttggggctgttgaagggaggaatgtagctttcattttctaagcaccgcaagagaaatggagaggaggtcctgtgtgtgccctgagatcccgaaaggggaattatgaactgcgaggagcatgtgcttcaaatcgtttgcaaatttgggccaatgagatgctctttaaaatgtcatcctcaaaagagggcatcccattcatgggtctctgtatgagcagccctaaaaagcaaagagcca

SEQ ID NO: 1097 - DNA, 997 bp, Homo sapiens
cacattttattttttaaaatgtgaaaccgtatcttggtcatgtctttagcagcatggaattttggaaagatgatgacatttgaggaaaggaggtgaaggaagagacttgagtttaaactggcaccttctaatttctctgcccccaaaaaggtattgatatatgtgttttaattgttgccaatatgtgtctgaaggttgaagaacactcagagaaaaaaatgaaaaaaacacatgtgtttaaagtggtccataactaaaaaaaaaaaaaaaaaaaaaaaggtggtccataactgaaagcagcctggaaatggtcatggaggtcatggaggtagtgctctggggtgcatttcactaagggctacatcatcccttgaggtttgcaaagctggtagctaaggaggatgaggtaatgcagggatgttcatctggcacatttcatctcaagagctgatcatctttaggtcgggaatgaattcctcaccccatatagaatattacagagttggctcaggtggacagagaggagagggcaaagaaattttgatgttctcaaggccaggaatgttgcccttatatgggtttccttggaggagtcggctgtgtgtgcagcttgttccttacttgaggtgtatcaagacgttcaccacaatattcagtaattaattatcccaatccacatttaggaaacagcagaggacactgtgacattatctaacaatctctcaggtcactgcagatgaaactagctttgggacataggcctcaaagattcctgtgtgtagcagtagctcattagcccttttcaagagaaatattattactgtcaaatcagaagcttttgaagccttttggtgctattctgtctaacacataaaagtcttctacccagggaggcatagtatttggtttgtacagaactgtttctcaaagtagttacttcatttgccttcaaatttctcctctattttcaccaccacttaactgttggccaattgga

SEQ ID NO: 1098 - DNA, 899 bp, Homo sapiens
aaattgtcttccttaaaattaccagcatggaaaaataaactattcccaaatgcgtgatgctgtgaatctgagagttcaaatgcagcattagtggaggttgtggttgatgggcaagtagctcatatgtcttgggataaaatgctcctaagaaggaattttggccccattcacaggaggacacttttttcctcattttggctttttttttttttttcccccggcctggacacaaagtccctagtaattttatcacaactcattttgggaatggtgattcctgggccataattgatttcaggagttggtaactgggctgcaaatcaaacacgtgggagaaaatatcttaccagtattgtcgaagccctttggtttatgtgctttggtaataaaatcctcagcaggggagttcaacaccatcttttggtttctgtttctaggtttcttctttcttgcttgaggaatgggttagtatgtgggtttgtgcaggagattcagagagagggcctaagattccgcttaggcttcatggggttcacatctttcgatttggggcctatttgatggctttgctttattttaaagtgttttttgtttcataaaacttatttctttcttcttagaggtcatttgtagagattgcattaaggcttacagttttgttgtctggtagaatgctttgtcttctttttaaaaaaggaactggcctgctagcttggcattagtgtgtaatgatgacatcatttatttgtctctataggaaataggcattcattcctttttttttttttttcccagaggggaatgagttcatgttgagagtatatgataggatgtattctccctggttatcataagcggacgcattttttcatttacttggaagatctttctgaaacata

SEQ ID NO: 1099 - DNA, 1467 bp, Homo sapiens
cagtatctctctgattcttgaagcctttctcagcctaataagggccctaaacttccactggaatcatggagagctcttttctgtccttttttattttttagtgaataagagtcagattcaggtaggacaggtttaattttgaaacttgaaaaattgctcaggacttcctcttcaggatatgagcattggtcttaaatatcaaaagaaaacaagatttttggtagggttcttttagataaatgcttactacttacaacatataggaagaggaaaaaaaaaacaaaaaagtgataaacattataaatagtgtatttcttcacttcctttaaccatcatttgcatatttgtgcccagtgtccaatactaagtgttgctttcaccactcaagtgactcttgggacctgtcctgagagctgtggtttcaggctggatgcaatgaagtctttccaattgttatacaattgactgtgagctacttaaatctgccacttattaagaatgactggttatgaatcatcccagttcccaaatatgatgatgaatttgtgattactctgcaacagttttcaaaacaagatctcatacctttcatcaggaagagggaaaatggtttcattttcaacacaggaatttgtttccctggttgagacataaaacatgtgtcttaatggttctgcaatgtgctgggatttactctgaaaggatagtgattcacgaagagatggagtcgggtttcacatcctttgaagtctagggttgcccaattgcagtcatggagcaacatgcagctgagaataagagccaactgttcctgagtttgtctttaacggttaaacatgcctcatgtggtgtgtcaaaagcttataaattcataattggggcaaggctgctgtgggtttagttgccaataatgtgttgatgttgggttcagagtgcccaattaggatggaacataaagcaatgcatggcaacgaatgaatatgagatcactcatgtttcagtggaattttctttgaagatccacaaaactggagaaatggctgcccggataacgctgacatcaccatgtggccatattcagagggctgaagaagtcctgacaaactaaagtggggtgcttctgaagttccctaaataggattggataaagtgtagggatagagagatggtcacatgcaggattccttcccacctccttcctgtcatatcagaatacttgttactgtggctgaagtgacatttccatccagaagccaggatctggtttagctgtgcttgtcttccttcccggagctgagtcatgaatggcagtttgggatcctccaaagtgaaaggtgtcttttgttcagccactcgaggctgctctctcactgtgctcagttacagtttaactggcatttccttgtcagtactctgtgctgttgtgtaaagcagattcaagctattctatttgcttcttcttatttg

SEQ ID NO: 1100 - DNA, 599 bp, Homo sapiens
agtttaatatcagaaaaacagattgattcaaagactttcaaaaggagaaaattcaatgtaatccttaaaattgttatgaaaattgttataaaaatcaaagcagaaccacccataatttggtggttaattttcaaaataaaaagcagctgaaattttagggctaattgcaaaaatgaataactagattaatccatccctgcattgttttaacctgagtttctaagacactgacttttcaaataagctaatataaaagaggggctccaaaaatttacccatacctatgacagaaagtagcttgcctttctgtgtattatttatgctacatggattaaaaattttataataaacttcttagtaaagaaagaaaatatctcatttttcctctacacttttgacttcttcttcttttttttttttttaaaaaaaattcccatctgctttaatgtttttctttggttaatattttgggatttgttcaacaaacttacttcttaataatgcttgattaagccttgtttgcaaaatcaaatatctacagatgtgggcaagaaacacaatcaagtaggctcagggtaaaaaaaaatgtctacagttta

SEQ ID NO: 1101 - DNA, 680 bp, Homo sapiens
aatactatgaaagtcaaaacaaatatgggtgcagtacaaatttagctggtagttttttgacctctgacttaggtgactattataataatctggtagctgctagtccttatattcctagtagctaactgtgggaggaagtgcatggtatcgaagttacaaaacaaatattagagtagggaaaatcaaacttctatgaaaaataagtcagcaagtgaatacgtaaaattgagtgggtatgtatgtgtatgtgtgtgtgcatcttcaaaataatagtcaattattatgcagtgatgtactgtggctctctggaaacataagaaccacatacaaaatataatgggatgaatcacaaagtcggttgcaggtagacatatgcttgggtacaattatttttagggtattttctgcaaataatggaagttaaaaggagaaatctaatcaaaaccagaatcagcttccagacagccaacccatctcagatgtgagaactttttgttagctggttataccatgccttccactccgtggtgagatgatgaagatgcccctgggtgaactgcaccctggttttcttccgtttcgtatacttcgttcttgctttgtgcatacctgaaatccatgcagactggaacgcactgtgcacagttgtgtggtgactgacgcctgaccgcttcatcatg

SEQ ID NO: 1102 - DNA, 501 bp, Homo sapiens
atcaatgactccctttgctattactccttttattagtaatacagagcacagctactccttgaagtgtttcataaagtttggtgacactcttaacactcctgagaggtcaagcatacaattggcttaggttggaggaacagtgaacttggtggtcttgttgagccctggtcatgcataactaggatgccagatgcttcgacctgtaataaaaaattccccttgagcttggtagaatttggcaggctcaccgttcatccttacatgagccgtgtgagtcaagcactgggccagctcggcagaggcatcgaagttcaatcacagcgcaaaatctaatcaattctcacagtcaatgaatgaactgatgattcaggtatttatagcaaaaggtgtgaagagattatttggaacatggtggagggtaagaaacaggtataaatctattccagaatttcatttcttgtgagtcttctaggaaatgagatgaatgaacttttaaagaac

SEQ ID NO: 1103 - DNA, 832 bp, Homo sapiens
tgtcaacatctatgctgagtgtgtagcccttattactcagcttggcactttacctttctctaagttgtcagaaactactagaaatttgaacggtttccatcaatgtattcaaatgaattgctttagtggtgggcagaggaaagatcctgttttttcctcccctaacacgcacatcccattaatcaacagattccttgttatttaataataaataaaaatacattaacttgttgaggcaaacatgtttcccaaagccattattaaaactgaattaccaacaacatggtttgaacagtaatatcatgaccacaagtcatttttctcagttgactttctgactggtgatacaaaatccatgggaactgtctgaattgcgaggcaaatattttagtaatgagtcgatccccaaaacaatttcaacactggaatggaaatttatacattccttaagctttgcttcaaagacaggtaaaattccttctgaattgggtaaatggaatgcattctataaactgtacccttttgttacaatgaacccaattgctcccgtcgttcataatctggcccagcaagccaattctttgttccattgctaatccatagtgcagattttaatctccaacaattagtaacccattcctacatatcttggaaagttcatgactgtcagggtaggcaatttttacgttgtgtatataggtctccaaagagacaatacatgtttgtggaatgaatacatgcttttaaaattcccatttcaataagtggagtttgcaggatactttaacatagcccagctgagaaaaattttagtgaaagaggaatctagaat

SEQ ID NO: 1104 - DNA, 649 bp, Homo sapiens
tacatactggtatacttttataggtgagtttttcaactaattttacagtactgataatctaaaaacttttgaaaataggaaaagaaggcaaattacccagttcagtttagaagatcattgtaacaattccaagatctcttgatgaaagtcattcagaaatttggagataaaatgttatttcattggacctgccaaaatatgaataactgccataatcatttattacctaagaagtttgatattgacccttacagttgagaattgttgtgtcttcaaacgaagttgttttctaattttttgttttttctgtttccagcaaaaagtatgctagaatagcttatcctaaattcattctaggttagttgataagttaactattttaagctcttccggcatttctacactcttaaagtcttaatatgaatttttttccaggtcactcgctagtgaaccttggaaagatttggcaaattgacttaatgtttgtccaaagtcagactcagcttatttttccggaagctctaagttaaaaaaaaaaaaaagatggaattagtgttggaaatcttattaagaatacagtggaagcatacttgttttgttcttttgttctgtttctatatttctgatccagctacgttgtttctctata

SEQ ID NO: 1105 - DNA, 661 bp, Homo sapiens
atccagaggaccgctaccggtctccagtagatttcacctggtgtagagagatctgggccaatcataacagaaaaaaagcattaacaatacataaaatgaagggggaaaattgatctattaaaaagaaaacaaatgcagatgaaaaagcaaagcatttctttttcaagtatgtcatcaactctcaacttcatatttattttgtcttcctgatctcttttctcccacaatatgggacatcctcatcactttacctttctgctcaatgtgtgcaaaatatattgcacacccagttttatgaaagcacaacagattcgggaggagaaagtttcctctgtgcaaatcttctaatcaattctaaagcattggtacttgggagttgatgctacttgagaagctcaggtgcaaggcatcctgatgactaagggttctgcaaatattttattgctgataaaggaggttctagaggacaaaacaatcatggagaagcataagtgatattaatcacttattaggtcaacttccaacccaggagattaggaaaagctcaacaaattaggccaaatcataaaatggcaccttggctttcaaccaacagctttctcctgaatacttgctgatagattcattgactgacccatttaggttctttgagcaccaagaa

SEQ ID NO: 1106 - DNA, 440 bp, Homo sapiens
tcaaaggaattcctcaacgtttgtagcagggattctacagaccaggtactgctcccccggagagtaggaattatttatggggaaattacttacacaggggatggagtgaggttgcattatatgcacacttaacccaggcacatccaaccatccatgcttggagtggaaagatgactatggaaggatgtagcccaggtgattccaacaccctcactcaatgagaacagcaagatgagaaacgagatccacctcttgccttatttctcatgcacatctcaaaatgtgagctcctgatgcccttggtgtggttctagcatctgaggaagtgcatttttcatgtgacatggcccctagacataagccaactactttaggttgttttcacccactagagcagaaagcttttccaacaccggaaggaatcctctgtggattaaaac

SEQ ID NO: 1107 - DNA, 1568 bp, Homo sapiens
ccggtgctggggacagcccctgtgggatctaagtcatcaaggaagatttccttcaggaaatgaaagctgggtggacgtagatggtgcgtaggagaagaacaggcagagaaagagcatgccgggagggagacggtgggaagaaccctcttgctagcatttaaggaacagcagaaactggcagaagccactgtggcctggttccagaggcctctgggggtggatgatgtgggctgaggcctgggggatcagtgggacctcagttgatagggcctggaagtgtggattgcagaatcggatctttacgtaagagcaatgggaagccccagaggcaggatgaggcatgatcaggtttgggtttgaaaagaccagtaaggcaagtgtgcaaagaacagaggggaaggaagcaagagaggactgagatcagctgggagctcctgcagagactagagatattagtggtccaggcaagagattgtcagtattgctcccagccacggaaaatttggctgttgtaggtctttcattgtgaaatgtaaacttattcttgggaattaagtattcaaacagtgaatgtggtaggcaggggctgaaatggttcgtaacctctacctgactgccaagtgccagcctccctttcatgtcatgaaagatacaagagagaacaggctcccaggccgttctacccccctttcaatcacacaaccagtgtgtgactgattgtgtgattggaaagggggtagagatagaagtaactggacttgggaaatatttaagcagcaacaaaatggaaagttattttgcaattacaagaataaactttcagtaaaactgctattaaagtctagatttatctaagggtaaattttgtgatatagggcttgtaggccatatgagaaaattttctaccagtaaaataaagtttgaatttgtttttattttgttgtaacaaaggcaataaagaggggaagtctctcaaatatttaaaaacttttatttttactttcagagaatttgaaggtatacagatgaaatctgacaagacgtgaatttataattctaaaaataatttcacagcagagagaaagcatatacctagatatgtacatatttattacaatataaagacataaatgtatatttctgaaatattctaaaaatataatgtaggaagaaatatttatcaaatacacagaattatatacagtatgcatttaggaaaagcagtagtaaaaatatgcacaaataaaccatctgtaaacacaatttttaagtcttataagtattgcatgcatttctgtgcattttacatttatgaaatcatatttttcctaggagttcaaatcacaaaacaaatgttatataacagatctctaacttttgcatgctttacacttgtcccatttaatagacagaaaaattatggcatgggaaatcattttataatattaaagtcacactgaatgtttttaagctgtgactaaactttgaaacattgccctgcaccacagatcctaaatcaagtactgcaaatattaaaaaaatgactgaggcaaattaccattagaacc

SEQ ID NO: 1108 - DNA, 854 bp, Homo sapiens
tgcatgtctgtgcttcatatgcacatacacaatttaaaaattattgcttcatctttaccctaatgccataaaggaatcacatttaaaaaataaacaattttaaggtcctctaacaaaataatgccccagtgaatcactagtcttataagttgtttgacttcgttaaagtccttttaaaaatagaggtgttctctagtttcccaataatgtttttatttcaatgcaggaagaacgcaatttcatgggaggcctgataactttaaccatcatttagcttggcttacattattaagcagggacattttcctaagtagtacattaagcagagctacagtaaatggattgtcagtattactcccagccccagaaaatttagctgttgtaggtcattcattgtgaaatgtaaacttattcttgggaattaaagattcaaacagtgaatgtggtaggcagggcctgaaacggtttgtaacctctacctgactgacaagtgccagcctccctttcatgtcatggaagatgcaagacagaacaggctcccaggccattctaagcacctgaagatggtgctgacacaggtgaagtgtaaaccagcagtgaaccctgtagaatgccttggatcccagcactcagtccgcttccctgagttggatatgatgttagcaaataccaccatctagaaagacagtacagcttctggaacaattttgcagaagaaaaagtatcaacacctgggcctaaatattctttataagctgttgtatggtgtggtgtttgaagtttgctttccggtaacgtagaagccataagcaccattcttgcagaaaagttgaaatggctgttttggtcttggt

SEQ ID NO: 1109 - DNA, 470 bp, Homo sapiens
ggtataccctaattgtatatcaaagaagtgtatttaaacaagacaaattattagccaaagaaaaaatgctaaaacttaaaaggtgtggcttactgtgataaacatgcatgctctttgctgaaggctggggtgtcacaatgcagctagaatactttccttaccctacttgattcagttctgttggttgggatgctcagaatttgacaaatttcataatagcatcagacacttggtggaggaataataatgtattcatttgggccttgttcagaaatttcatctgtaattgcatgtttctctaaataatctaccaataagcaaatgctccttaacttgccattggcaaacagcatttttttctaggaaaatcctagaaggtgctgctaaaagaacacaatgatagaatccgggtttaaacaccgacatgtcagcctataaagccatatgttacaaatgtcttatttccacca

SEQ ID NO: 1110 - DNA, 610 bp, Homo sapiens
ccagcatagctcatccctcgtcattctcactaccttgcagaggataatgaaccgcctagatgctcacctgaggcgtattatcgctggcaaaacgcgatggggagttcccggctgggcaccagggtgcctgagtgtagcatctcaacaggctcattgtctgtggcctggatgtcgtatttgcggacaatctgtaatgcacacgcacacaaaaacagaattacccctctcttcttctgccttgtgaaacagcacagaacataattgcagaaaccggtaaaggttttacccaacaaagagccaaatgcagttgaagctctgctaatcggcgaccaatgcacattctttttccaacgccaaatggaagatgcgcaaaaggattaattttttccttctcctgaagccaacgttcaggtctaaactgacttgaatcttcaaaattgtcttcactggatcccaacacctgggtatttagcatgagcactgtctaaacacatgcagagacacatagtatttaaaataaccagaagagacctttgaatggcaaaattgacacaagttgtcaccttacaaatcaaaagccaaatccacaaatttataataatgatggttg

SEQ ID NO: 1111 - DNA, 1452 bp, Homo sapiens
aacatgtcaactattctctaccatctctgcattcccaaaatgaatattttccagtacaaagtctagggagatctggtgaatatttgcaaagtgtatcttccaaggttttgtaaggtatagaatatacaaattctacttactcctttgggtaaagcatattcacccagaactgttgccttgtcaagagtccgagttgtaaatggtacactcggcgtaagcctgaaaagataaaatcaaagatgtaaaggtgagcacagtctaagttctctctgaagtgtcaatgggaatgcagattggattaaataaatgctgcccaagtgcatactcaaagaggcagcatgatcacagatcttcctaaagaagttgtttttttcttctcaataattgtatctcttgttcctctcatcttcttgagttagttaaaaccccagtgcaaggctgtttagtaaactgttaacgttggttttcccccttcattccagactaaaatgtgtatgtttccgtgctagcccttgaagcgtgatgtttgttctatgtttctccaatctactcttcacaaagttgacagtatccttctaatcctaaaatgttgtgagttttgttttcccaaaaggatgtaaaaagaatttccaaaaaatgttttataccagaggctcaaaagcaaagctttctctgtgtcctattatataataatatagctcttttgtgagcctccatctcataaccttcaatcatgcccctatcttaattagtgcttacagcgttcattagagtagcaagattattgaattaaaggggagggcactggctttccaagatttaatagaatttgcccaaatgatttaggaaatgagtgccagaaaagaaatatggctccaaagatttttttgcagtgtgataattgtttctaattagctaggggaagccgcccatgagtaggggaccacttgttttgtgtttacgagaacagtgttctaacacatttatattggctcagagataggctcttacctcatagattctttcagacaggcttttaaatacggcatattcctcaaatcttctgcccgtggcacctgattctcaggtaatacactttgaatttccttaagaagcttttgttgcacttggggattacgggataaattgtagagaatccacattagactgtttgctgtctgcaagccaaatggacataaacttgagtttttgtaaataactgcattaaaccactattagctgaaaaaaaggtgatgcccaccaccttattctgcaaatgtatcagtgaagctctttcacgcgtccttatagctacgcctttagacaaatccaatatataaaaaagcagacttatttcataaaacatatcaattaaggatatattttaaattatttactgagggaatcaaagtataatcctttaatcagctgctttagaacatttaaatacag

SEQ ID NO: 1112 - DNA, 1010 bp, Homo sapiens
gttgcttgatataaaaaacattcatataaaaatggagtaaacagagagggatggtgatcctcagggtgttgctaatgagaggctttaagagaatgttatagtggaaatggacaataaatggcatttctgaaatttaaaagttcctttggccacaccctaaaaagtcaccacaaaaataaacaggcactacctacactgagggttacaaccacatgtaaacagccctcatacgagggtgccaacaccaaaaataagaaattcaaacattgagctgagtactccagctacagtttctgacaaaggcccacacccttttaagtggcatcttttatttcctctgcacaggcaatgactagagaaaaaatattggtggaaacagccaatgtagctttaagctacataatattcaccactagtagtcatatgtatttattttttaggccgtactttgctaatttaagccaaatatttcctgaaaatgatcattgtgtccacctccgcagacatgaagacgctgttgctaagtgccatgtgccactcacacaaatgagcaccaagtgcaagaccattcagagatgatggttattttattatttttggaagaagatgcctccaaggcagtcttcttcatgtcagaggactggcagcctcggctgcaaataaactgtagatgccattattataagagtctaatttacaaaacaggaagagggtgtagccatcaaattagatacactttcaaatggttctgattttccaaatgtgactttcagaatagccaggaccaaaaaagaaacagatttaaccatatcagtgagtccctcaccgcaagtaccaaatagagtttccaaagggcagatgactgtagcttttaccaaagccacgtaaggcagtctgagcctgtagggaaaactgcaggggctaagctgcagcagctgatttgaggggaagtggcctggaaaacctcaggggcacaaactatccttgattgacctccatggaacagacca

SEQ ID NO: 1113 - DNA, 530 bp, Homo sapiens
tgggtgacactgtactttgatcactggaaggagccacccagggtaagcagttcaacaggaaagtgagcgaggatggattcccactttcaaccgccttgtggagcaggaggagaaatgagaacctcgctatctcctgatagagaaaaccctacctttacttcaggcaagaaacagcacagaaggggaagcacatggaaaataaacaactgctttacattttgcttagagactttaaggtgcatgaaatgttggacttaggaggaggttagcgtgcgccactcccatcacagctcgaactagtatccaagtcaattaaacctacctgaatgcctatggcaggatttgtttggggttggtctcacttagtatctgctatctcctagggagtatcggccacatcagagacagaattttggtctttacaatgagctgttttgcttcagttaaaatccacttgtcccagactctttgggactttgtttacaattctaagcagataaaaatattattggcttgaaagagagtatgcc

SEQ ID NO: 1114 - DNA, 808 bp, Homo sapiens
acagtaagtaacagccacagttaggcactttggggtaacatgtgcaactgaacaaaatacttccaattttgaaaaatctggattctgtatcttgccagggcagagaactttactgctcctgaactcccgtagcagtttgcatggacatcatggcactcatcacatcctactctggctttttgtcactggggcacatgaagtctcctcctacccagagtttaagcacagaagcccgtgcatggaggcaccgtggcgtctggtatgaggccgtgcgctgaggcaccgtggcatagatgctgtgcgcggaggcaccgtggcatctagtatgagacttttcatttttgtggagttgatgctagtgaatcccagtgaaatgaatgagatgaattactatttaaaatctgtcatctaaaaatggtacagaccgttcatttagcaaactcaaatccagcccacccttaccgtttccaccgcagccagctggagctctgtgacagcagcatacaattctttctttgaaagccgattctggtgataaatgtcacaaaggaaatctgcactaggctgctgagaatacttctctaaccggttgtcgatacaagctttgactattagagcagagaagaaagagaggaagtcagctgaaaattgggatgaggaaaatcacagaagaaaacctcagtccaaactccttcttgcaatatctaaatagtcttttcaggaacactgacaatttgctacacacactaattatattattgccttcttgtcaagtcggcaaggatttttcaataccgacatgagcaag

SEQ ID NO: 1115 - DNA, 633 bp, Homo sapiens
cttaattcccaaagaagactacagaaagcttgttacttagaatttgtgtatgctggggcaatccccaaaacacctgtgtttgcaaaacctaaatgtggtgatgaggctcaggagatcactccagacctcctctctgaagctccagacacgggggtgctgggctggttctggctggttgtgaagggcggccctttacctgatttgaaaatggtgtcccaggccagagtgtggtcctgccagaccttggtgttgaggctcttgtgcagctcgactggagtgaccatcatcctcccaaacgtgctcatcatctgagagaaatgcaaatgcctttttattctgaattctccttctctcaaagacaatgttcgttctggaagaggaacattctaaaccgcagcaccctgcactttttaaaaggctggaattacaaggacacccccggctctctctgcaccggtcctgggagcaatgcccgtaccccacctccacctcctttcaatattgaaggtaatgtgggggatgattttccactggatgtgtttgataaaaattgtaatcttatgacctaattgtaaaaaaaaaaaaaaaaagaggaaaaacgataactttcatattcacttcaatttctaataa

SEQ ID NO: 1116 - DNA, 804 bp, Homo sapiens
catatatgcacataaatatactaaaatatataatgcacattaaaatgaacacttaactattgaaataaaatatgtgtgtatgccattttttgggaatcactgtgaagttctgtaaaaatcgatctgtaaaacatcaatcaagaaaactgctttcttaaagaggctgcttactgttttgatggccatgatgaagttcacagcttcatcccctgcattcttctggagaagcccaaatctcttctcatacaacacgaggcagatacctgtcatttaaaataatcatcactttacacaaacagcaatgctggagttggagtctatgtttagctggttattaaagactcaattctatgcctcttaaaagtgtgggattttctgagaaaaggcaacagtccaagaatattgaggaaaagcagagtctgagagaaaggggacaccatcactttctttttctagaaattatctccaggtccaatgactcatcacctcagagtgtcatgatcagagatccactgtcctgatcaagtcacacaggagatccaggggccctagcaaaggtgctgcagggtcgggtctgcactctgcctctaacccagctgtgtttttagagtcacttattggattctatctcctgacataatgaattggaagccattcaccagaggaagagaagggaagggaataattatgttctaaacacccattacacgccaggtactgggctagcacttcatatagggttttttttccttccatttcatcattttatttagaaggaacctttttacaaataaaattctcaac

SEQ ID NO: 1117 - DNA, 734 bp, Homo sapiens
ctcattaacaatccatagttcaaggcataacttaagcacctaaaagaagcattaaaagggctgctctggcctttccctaggcagcaataatgcctgtttacaaaagagttgtcaaaagagccatgttttatccgcaaaatcacctgcaaaatcagtgagcaagtctgtgacgacaacttactttcaaacgaccatttgttcagttcgctgtacaagtcttcaacgtggcctctttcatcacagagctcatctattctgcccataaaatcggccaagaccttcaaagaaaacaaccgcaaaagacacattttaaagccgttgaaggaaaacaaaactttaaagctcactgagctaacttcaggtcttgctacatcgcatattcactggccataatgttattcatcctgaagtcacactaattatatattctccctgggaacccaccttatcccctaatgacctcgtcctgggttatttcctgagcttttcctgaagccaccctgaagcttaagtttcagcttttgatctaaaaataattctggcaatttaagaaaaggaaaacattttttttttctaatcagaatgggggaataaaaccacaaaggaatcagctaactgtccctgttggcccagcatctcaaggattgtgttgcagcagctatcctgaggtgtgcccttccacatctgggcaagcaaacgtctctttattggttggtggttatgttaagcatgtt

SEQ ID NO: 1118 - DNA, 3124 bp, Homo sapiens
ctcattgtgatatgactttaaaagagggtggaggagggagaaataagggtttggtggggaggaggctgtaggaaggaatggagagaaagagaagacccccactttgaatcacccgaattgcattcttttttcctttgttctttgtagctgtgacttgaagctccaccaatatccctatgtccccacgagccccaggaaagctggccccagcctgcagacctcattgattttgttgtccagcttcatcacttcccctggtttcattagtttcttttgaaaggcactccggacccgctgccagtcttccccttccctgtgagagaagcaggaatacatttagagcacactgaaaagaaaagaaggagatgcagaaatactccagctgcaacttcaggaaccataaaatcaaacaaacactgagaatcatgccaagaaatagccagagaatattagcatcagaatatttgggataaaatagtgatcatcttttgacaatagtttgacaataggatgaaaaagcacctttcctcctagtcaaagattgcaccaaaaagttgaagtccagataatttgggttcagggattttgaggtgtccttgcagggagtggggctgggaggcctggggacaattcctagcggtaaaagggggcatgtgaacaccccatcaccagcaactcagatctgtttgagggaagaatcttgtcttctttcaactcattggtgtgggcttcatatttacaaaatatctcagatttagaattttgccatcgcctccaaataataacatacagtcagagagtcactggagtaataaaaagccttttgcgatcgtgcacttgtaggcacctgccccatagcagaccatacagcctgtgaagcaccgtgaattaatagggtttttaattccagtcattatatcctggaaaatataacgattaggcattacagtttgggggtaaataaaggtgctaacttgttaaatgctaacaactaaaaagcagaagaatcacatcccatagtagcatttgtcgacctaaaacacaactttgatatccctccttattccacctttacaagtagaaataaggcatgtcccccaatcctctgcagaaaatgtcactgtaaaaagccaaagaggctaactcctcgcttttgagcttacaaggtgtttcagggagttttaagggataattttgtttgtataagatgtttgcctggtacgctgacttcagaacctcatcctgcccaagagtctgaacaccacagttggtacaaccctgttttggcgtttctttgatgggagggtgtggccctgccctgttgccagagagaacgcaggtgctgggtgcacagcacggcttttccgtggaccgactctaatctgtacaagagctcagggttgcgatggcacgggagaggggctttggtatccgccctacgtaagaagcttccaaccccagggaactctaactccgcctcttcacaatttccaggcgccgtcaggctcatcaggtctggccgcatgcccaggtccctcggattggactcacaggatcagcagcccgtagccttctttgcggtagtcgcgataggccttccacggtttgatctccagccgctgcgggtacgcgctctcggtgcggtacagcgcttccagcaggcatggcgagcccaggtgcaccgactcaaaggaacccaacttcatgcggaaaatcttgccatacttcttgtggtactccacctgcagccggccgggcacagcgcggtgtcagcgcgcatcctccgccgtgcccgaagcgctttccctcctcccgcctccttcctcctaggggaccggggaccctccctgcccagacgccgaagcgcaccatgcgcccgaggcgcgcatgtcggggagggtttggagcgccactgggagggcggaagagggaggagagagtcaggggcgcgaaaaggggtttaccagggtgtcgtgctgtttcttgagaccccctttccagagaatctgcagcaggctgcccagcagtggccagctggtggggcccggcagggcggccgcgttctgagtctcgccaccagctgtcagcgggcagactggcacctctcgcggctgaggggacgtgtacgccgtagatgtcaccagtctcgggggctgcctcggactgcgcagctgctgcaggaaggcggcaagcgagcggctcttgctgatgggggagctcatggcagcgggggacaccggagcgcgggaaggcaggaggatggggtggggcgaggttggtacgaggtgctagtgggagtcggggcttaacgattctgggaaaaggaagcaaagagggccagctggtgtgatggagcggggtgaggcgggacaggcagcagaaaggacctcggcgaggatgctcgacgctgcaccacgcgacagcctcagagcattggtgcctccttgcactggccgcaggggctggaagagggtggccggtgtctggggacctcttgaaaagggaaagctgggagtcctcctgttggtccgcaaggctgacctctagggtctggctggagccacggggaggtgtcaaggagggtagatgagatgctgctggcgctgcgtttcctcctgtccctctccatgttcctatgcccagggaccatgcatttatggagacagagcatgccctgggtggccaatgagcacgcagaggagggcggagtggcccccggctggccagactccgagggacgcgggacccaggggagggggggtggaaggaggatggagtcagcgaggtgagcgagggcgtccgggcctggggtgaccggggctatgttcgctgggcgcgggaggtggggtgggggcggcagactccaccccggagataacccccaggaagtcatgcgaagcccggagttcaccgggtgtgcttcgaacgcgcctccccgccctcccccggcgggcaggagccggcagcggcggccgtggttgccgcccggcgcttgcacaatcgcgatgccgggcgggcgaggtccccgagtgcgggcccagaaaagctgccggcgtctgccagggccccggggagcccgggcgcctcccggggagccagatacccccagcctggactgaagtga

SEQ ID NO: 1119 - DNA, 769 bp, Homo sapiens
gttacttctttaggaagttaggaaatgcgccttgagagcgtggcttgcaccaacgatgcttgaattcaggctgggccacctcccctatgtccactgcccgcctctgttcttctacaccgactaccttgtgcaaaggaggggcacacagagcttgaaaccaccgcccccagtactccccctctcccccaaggtgcgtcctaggcaggtccagtgacaaacatacacaatttctagagttaccgcggctggcaagagtagaactcgctttgctaattcaggaacggaagttggagatttttgttgattgttttaaagtggctcgaatcctttcaacctgatccaatacaaaactaccaccagccagggaggaggggagggacattctgtttcctcgccctgcttttcaattacgtgtctcagtcatttttgccccaagtgttggcaaatccttccctggtaaattcttttgtaagcctctagtttgtttcttaaaaatcttttgcagtccaacttaagctttaacaccatcatttctgatttgtctggaggggctaatgactgtttatgttaataaaaataatagctattgatatatactaaactttatgaatcttgtacatatttatatatacattgtatggtatatatgttacagcatacactatagattatgttatatgcaatacacactaaatatacataatatagtatagattgcatacagtatgtagattccatatgttatataatattctcatgaaagctttct

SEQ ID NO: 1120 - DNA, 850 bp, Homo sapiens
tagctctaaacagaaggtctatgtttttcactactgagtaccttgattctggtgaggtgcttggacacagtgaatggtctattgttatttcaactattgagtaattttcccaattattctttcttttccttctcttttggcagatatgcacaaggagaagaggaaataatttcagacttgctaggtttttctaagagtttcatgctatatagctttatatactctaaatagatatttaaatatatgggcaatcattagttacatgatagctaaaaagaaaattcctgtttcagggatattggtttctcatgttcagtggagaaaatccccagtaatttttagaccggattgcagaggaaagcaagactagttctttgaaacttcattgaccccaatacatacctgtccttgagaagtatgattaaattcaaaatgactatttttgatcccgcttccaggaattcactattcctcatctgtcctcatccttcactcactacttagcctctatgagtcatccggatagggatcttgtcaggaattactaatgagagatcttgaaatgcctcataaatgcctgccatcattactgagacaggctcaggccctctgttttgctctgggaaatcttaccaagtcctggaatggataattagacttcagccctcataccaagggaccacccatgacaacatgtgtgtgtgagttcacacacctgtgtacacatgtataatgagggtggggtggaggagcctgtaggagttcaagggctggtttctctgcactggaaaatacaaaacactttcaagtatatgcaatagtaatatagttttgtgcttaaaactgctta

SEQ ID NO: 1121 - DNA, 1213 bp, Homo sapiens
tactattgcaaaaataacagcgattaagtgccttacttgttgtaactgtacttgttcaattgagtctatctttctgttaaacttagctcctggtaaaaaggtgtgtctagttgcaaatcttatatataaagaaacattttcttttgtttttttcctattttcaaaatatctagtaaaatagagatctgtgtgagacagatgtgcactctttaacaggttatctccacatgaaaacagagaatttattaaatgaattaatatgtgtaaaatatttgggaagatatagatgtagtataactactgatttaagagtcaagtgaagccagctaatgaaaaaatccattgatttttttaaatgttccaatggtgccatacatgtttcataattcagttttaaaattacatcatcacatagatacctattttatcctttcttgcatgatatgacttggctaataccatcagagtgaaaattggggaaattccatgacaggattattattgttgattaatttggacccaaagtatagtttgctctgctcctatatgtcaaaatcctgcctccacataccatcttattggtgttgacttggacagcattctgcagcatgattgagcttaggatgcatttttgccagagctttaatatgaaccaacaagcatacaccttgataggaaattggcacctaaaggcacctggtggaaagtacctctgtggttagatgagtaaactccagcagtgaatagggatatccggttttttgtttatgaacataaagtggcaaacaaaacaattacaagccaagaaaagtctggaagtgtcctttcatctttgagaaaaaaaaaatcagttagcagagtacttacgcagtctttgtgcagtagcaattgccaaacacccctcacaatccagattttattacttgatttttcaccaacagagaacagcgatgtaacctccttctgatttttgtgccatatgaaacagtggtgtttacagtattgaggaggaagtttctcagagttcagtcctattgcagcttgcatggaataatttgggatcttacttgtttatgtgaatattcacagattcctttagaataatgggactttccattgaaaaaaatgtaatgtgaatttccagtgatttattgatttgttttatactctgtccagttagaattctttggaagtggaatcagtccagagacgg

SEQ ID NO: 1122 - DNA, 699 bp, Homo sapiens
aactaacatttgagctcagacttaaattgcgggaaatggtcagcttcactaacgcctggaggaaaagaggcagggggcctctctcagcatcttgagctcaaggtgtaaagagaaccacgaagagaatagcacacaggatgctgatcagatgcataaatatatttaatatttattctaaagacaaagaggtcatattccctactcccatctctaaatctaattatcaaatggctcctggttggcatgctttcatattgcagaggtgttttattttttcaagatcattttgtttagtggcacaggtgtgaaagttaagagtctaaatagacatgaagctcttaaaataagaaataaactgaataacgtcattaggattaccttctttatttccaccagttcacaggtgcaacaaggttctatgggctaagcataagaagaatgtaaatgttggtcaatttctcaaacactgcagattacatttagaagttatttgaaggccatttgatcagccaaacacagcacagacacccttgagcacctgcaaggttagaagcacatggctagcctctgttcttgtccctgaggaatctacttgctctcaaatcatgtgtttaaaatgaaacagagctggagtctgtgtgatgaacttccttgggttttacctgcccagcaaccaagatcttgtcttctgattgctga

SEQ ID NO: 1123 - DNA, 558 bp, Homo sapiens
attcaattgataatatatggcccatctgatgtcacgtgctttaatctggtattatttgtgtttatcacatatgcttccttcacaaatcaaccacaagctatctgttactttgtctttccctttaggtatctctattggagatgaacgcatgttcaatacacgtggcctgcctgagtcattagcaaagtgtccaacaactctgaggtactgaaaaatgaaatgactagttaatgtagattgagagtccacatgccagtcacatctcgtctcacttaaatctcccaccaaacttctaaaaaagatgcagccgagatcatgaaactcaggaggacaccaagtcacacagcactcagttgtgatttgaacccccggggatccctgactcctgagccatcacccttgttcacattgagactgcctgtatccctgcctttccacaaagaatattcataacttgtagggcttaaaatgcgcgcccatgacttggatatgaaaaagaataactattttctatgactggcttcatctggctgtgtaacccctattcctgttgtgcca

SEQ ID NO: 1124 - DNA, 1657 bp, Homo sapiens
gggactctcgtctgctttttcacttaatccagcagtttgggaacagcatcaggcctcttgttttgtttccagttgcatcctcttaacagcacgctctaagggtgctttatccaatattgtaaaaggaaactaaagcaagatttgttttgaggattgcttggtgcccctttaaaaaaattagacaccaacccaggaaaagagttggaaaaaagtaccccaaaattttcccatttacctaggctgtctttaagaccaatatcagtcaccagcaattaccttttgttcccagacaggaaaattgaatgactgcatcaacgctaaaaagcttggattgaatcagacactttcctcagaagtgaaaaatgcctgaccacaagccctagttaatttaaggccacttagatggcgactccaggagaattccaactcagtgccccaagatttctcagggacttggatttctccctaacctactggaaaagaatttgtcatcagcaaagctcttccgtagagaaacttgagataaaatgggtctttcaacagggctgtgattgtgtgaagggatataaactggcaagaattgtgctcctcattcttgatggaaggttaacatgattaggatctccagaagtctcatatagcaagattaaattctattttgcatactgaagtctcagatactcaaatttccactagcatgttagattctcagtgtgctccctttatgtgggaaatctgtaacaaccacaaggcacactcaatccttcctcaggcataggcacacccagacccacccacatgcgcacacacccatacgtccacacgtgcacccaggcacccgtgctgcatgccctcacatgcacagccccacatgcaagcacacctccatgcaactttcctcaccaacacgaacatgcacccacattacacacccatatctattcccccacatgcacctcttcccacagacacatcttccacacatgcatgccccccgcacttgtgatttaatggcacatatgattcagaatgtctgtgaagccatttccaacctgtttttgtaataacctgtgcttctcagtccaaaagatagtggaacgtatgtttccaggaaaatatgaaacaggaatttctcaatctcctagcagcatccccaccctgctgtactaatattagtccatgttgccaatagcagcagcccatgtcagactggctgcctctcctccccacctaatccccacttttcttgtttgtaattgaagaacaaccgactgtatctcatgctcgggctgaccaatgagtaagcaaaagtgttatgcggggagacagccttctaattctgcagacattattaaaataatccaacacaggtacccgtgcaatcaattttcagtttctaggatgagagatatgtcaccttgccttcaaaaggccaaacctggctcgcttcattggctcccttctcaatgtctgatacaggacccaaaaaggtctatgcatcctgtggcaagaaggtggcatcctcacaatctgggacctgactctggtgaaaagtgttgtttagggaacagatgcttgatctttttactttcgctgctcgccaccctttaagaggaaaatcttccccaaatctctcttcaaatcaaatgccggatgt

SEQ ID NO: 1125 - DNA, 791 bp, Homo sapiens
gccaatatggtgatgcctgtctagagcctggacttcacaacccagtgatgtcaaccacacttattccacccatcgtgcctcgagatgtgggtccacgtgcagggggggcctctgtgcatggtggtcagagagctcgccatccctctttgtgtgctcttacccagctctccaggcagtcaagggctaaagggagaggtaggtgggagctcccttgagcagaggggcctttgtagggtgatggaggctcaagagggaatttcctgccctgttctggagcttgggcccccagtcctgcctgaagtcccagggtccacagtggcacagatagagacagctttccggaccttggagaagaatctcagtaataaccgggggcagggcggggtgctaattaccaaaggacactcactccctacagagttctcctcccgaacacaacttgatggaaggtaaacacccacacaggacatttaaataatgcccaagccggaatgcgttgataaccagtggcgtggacattcggcagctttccatttccagaacatactcgactgtggagaaaagacgatggtagctacctgagggccttagcatttgagccctggtaggtgagggaatctgtcagagtgaataataaactcagtactcccaaagaccacagcctcccttaatggtgtactccataaaccctcctgatttttttgcaagaattccacttgctctctagttctgctacttacattttccataggtagtggttaagaccagaatgagagaaacctgcttttaag

SEQ ID NO: 1126 - DNA, 954 bp, Homo sapiens
taaaagattactgaagggaatatttatataatatcttgaaaagcatgcacctagaagcaacttccaagggtcacagccacctggttagctttagagaaaaaagtgcctaaggtgttacattttcaaggatgtttgaagaatgtgagtggaattttctatgcagtttcacagggagagcaattatttgggtgtccttcagaattcaacactacatctctctcagtccatcctaatttaaggcactttccctgctgcataacttcattcatgttagttctgcttctagtggaaatggggaattcatatataatagtatttctaatgtttaggtttaattttttaaagttgtgaatttccaagctctcaccatctccttagatcttcacaagtcatgacatatataccaggttgaccaccattttacaaataagaaaattctgagagcagagaatttaaatcctgtctttattcagctcttaccataatcccccattttccatcttgagtatagtgtctttccatacctttgttgattattgagttttccttacatttagatgacaaatacgactccaaaatacacatttatcttgagtccttcgctgaccaacatttgaacctacagtatttagagaaatcctaaaacagacatttgcactaattccagaagctgaaggggctcaaaactccgggctctcagctctccagtggctagagatcatgtgactaacctcagccaatcccatgctctgtctggaggtgttcagtgtgcaaagaaacattgcagacttcagatacatttggtggcagcagccacagaattcagcgtccaatgccagcagtctgttattgcttgtaatagtgtccatgaatatgaatcaaaccagactttccctttggtataattttggccacagtttggctgcctaatttccctagatgcctgcttattta

SEQ ID NO: 1127 - DNA, 827 bp, Homo sapiens
acatattatcctcacctctgatgcatacttgctcacttaccttttcttttctcaaaaccacctctcataaaataatctgaaattccttattgatctcattcaaaatctgtttctctcacaggcgtatcctcaaatgaagccttgtctctgtgaaattcctggtaagagaagttgaggcatcaatagtggatcaggaggtatttttaggggaagaggagtctcagtattcatggaactcaatgagacctccacctacacaaggccaaggctgcatatggatgtagagaaataaaactcagatgttgaaaagtatctgaagagatgatagcaaagggaaattatcttttatctttcagataaatcgtcattttatggaatgccacaggaagaagttttctttacaagttctgaagacttgtgatgaatgagtccatagtttcacctttgaaaatgtccctgggagtgtcaaccccatcacttttacttatattacactcataatcagttcatctcgccaagaaaaataatattatcctcatgcccaaacttgtgacttgatttgaaaaccagtaaatcagaaataaaacttcccatgtgtttttttcctacatgaatccaagtgactcagatattgtgttattcaataagactattaccatgactcaggtaaaagggccgtttatattttctgaagtctcaagtctagggtccaaaataaaactagcatcttttatagaataatttttctctaaaatgaaatgtgtatgtcacctggttgtcaaaatccttatttaaatctttaaggagaaaagcaatggtttggagag

SEQ ID NO: 1128 - DNA, 551 bp, Homo sapiens
tatgcaggtaatataaggctctgcttcgcttctggccaaaacttcctggcacaggaggacatggttctcagatgtgagaacatgttctgtcttctgcaggaaaccagaaggggttctcccttctttgattgcaggaggaaagaattctaatggaatccatatgttctttggccccatttaaaactccacactctggaaaagtagatggtgtcctggagtgaatcccaaagtcaggcccactggaaagggtcactgggctttctcctgcttcagtggcctgggattttaaaagttggaaaagtttatccatacaactttattggaaatgattgttttttattctattcttgcccttttatggtataaagtctttgcttttatgttgttaattttagatttaggcttctttgatttcattcacttccttaacaaagtaaaaagttggcaactctttgaagttgctgcaaccatattcccaactacagcatccttctatgagcctctgctctcttaatgggtatagcccaagggctagaaatagaccaattctt

SEQ ID NO: 1129 - DNA, 770 bp, Homo sapiens
ttttactcctaagcactgatttgggatttgagaaaaattttacaaaaaatcagacttttactcctaagcactgatttgggatttgagaaaaatccagctcatccgtctgatctggcctcttgatctcagaagctaggggagaccatttttgctccacacataactaaagccaatagaggaaggtggtttgcagaggtaaagaggattgaagcagttgagcagacagcacagaggagaaatgaggcaaaggtctgatgtcctaatggtttccatctgcaatctcttccaaaggcactttctgatcaagtagcaatttggactttttttagttgtaagcaacagaaactggcccggctatcctcatccataaagattgtattgcattcaaaggcttgcaaaagtgtggctagatgatcaagcttggggtgtggggaggattccaaaacggaaacccaccactgatgcatggccagaaccccccaccagaggatcctgctgtgaagaattaagagccgtggatccatcgacgccaggtcatctacccaccctctggctgctggcagtgggaagagcgagttggtgcccttccacttctgtagttgatactggggtcctgattgctaccggggtgctctggttatatatcacactccagacttggtggtgtgaaacaataacagtcttttattattatcatacctcatcatgctgggagatgactctcatctcctcactgaggtttcctgtgcagttgcagagagttggtgacc

SEQ ID NO: 1130 - DNA, 1218 bp, Homo sapiens
acaattgcctcaacacgaaggaatctacttgatttcctaaaactagaatcctggttgctaaaggttccataagacaccccatatattgcttagcaaatcaccattcattgtttaaagtagttcaaattagtttcaatttcttgcaggcaaagacacccaacggaagcattggattccaagacattgaattccttgaaaggagagatttaaaagtacctagaatacaaccttccatatgacatttattaaaattggacaactatactttgagaaaatgattgatatgaattacagtgtgattgacctatggtctcagatccaaaccgtaaaccctacacattcccacggctaatcgttttaggaatagaccaatccccagatagtaagtgaagactcaatggattttggaagtcagtttggcacaaagaccctggaacagcttccggggctagaggtggagtttcctgttgctgaggtggaagatcacgagacaatcaagaaacatgcctcttccatggcttgaggtcaagtctaagcttgctcagtatctgttactctctgattgaacttccctttaattctcccatcagccaagctttgtctctgaggtcttataggaagtttttggcaaagtggcagaggtggtgaaggacatcatgaaaaacctggagccaatgaagcagaaagacttattctggaatacatggtgtggcatcctagaaaactctagatatgacaggtaaaaacctgtggagggaagagcgcgttaacattcaacattgaagtaagttaacctcaacgaatggttgtttggttgacaaaaaatagacccaaacagagtgatattcagccagtatcattcaaatacctgtgggttatctgaacaacattcttgctttcaatttcttaatgctcaaattgcttagacattttttctttcccaaacaggtgggtaaatctaacttttttggtgtctctcttggacatcccagttaatgctgatagttaaatttatactagacaatcccataggaagctgcccctcagagatccgcctgcttcctggagacacttctgacattcttcaaaattgccagataacatttgaatagctctgcgttagaatagccaataacccctgcattagaatagccaatgtaatcactgattcttcagctgcactccagagccttagggaataagttgcatgaaaaattt

SEQ ID NO: 1131 - DNA, 893 bp, Homo sapiens
cagaggccaaggccaggattatgttcctaccctacccttaaactctgggtcaaggtgagagtgttcctttaccggaatcgaaggttcgtctctcttgctctcatttgctgttttcaggctgatttttccagcaatgagtaacagcaggggccatccgtttacttcaagggaaaactctcctccccatgtgcagctggtctgacccggttctgcagcaggacaatttgccaagactttgatgcagaaaattcccttaaggggacttatttggtcgtaagtatcgtgtgtgaaagacatcaatatttaagtcctggttgggcttcatcagattcaaccctgttcttgtccagttttatcaaaatgtataaagtctaatcttagggaacaaatgtgcagtgatgctaatgaattttaatagcattggacgtctttgatgccttgtcttatgtcctcctgacctatcttgttgctctggcattaagttgacaaacagctgtggccaggtgaacctgacctcagtagtacctcatgtcctggggcttttctactggccacaggcagcacctgcagccatctagcgcaagaccaaacctgaaagtgcaggagaggtaacacctaccggggcaacccttggctgaatggggctgggtggataaatgctgtctctgtagtgaggacagttctgagggacaggtgctggagaccagagggtttgcaggaggagcaagctccagcggcccacagggtcatcagcccagtggcagcccttggaacagcttcctatcttcacctttttcacgtttcctccagcttccccagatcccttcccaccatgaactccctgcagcaagccctcgtctcaggctctgtccagacgttaatgtagccgtgac

SEQ ID NO: 1132 - DNA, 1331 bp, Homo sapiens
ggagaactaattcttcttgggcagccaatcaaatgtggagtctgataaatacaattttgcttcccattccccatcagcaaagagattattacaaaataaagtctgtaatgatgagttacagttggatataaacctattaaaataatgcattatatagattaattccctatgtatgcattattcaagtgcttttaatacagttccccccctttggggagtgggatcttaaaataaaaaggagaaaagttttcattgctatgttgtcctatatatcttgtcaaattatgcaaaaaatacatgtagacttgtttcacaaacataactagatagcataattacttgggtggtactaaaatttgtttgaacaaagttagttctaaaggaagtgaggcaggattctttttgagaagtataatatttaatttttatgggtatgggaaaatacagtgtagatgagaataactacgatttgtatccttattttatcagataacagttatataaggtatagaaacttagaggcattacccaattgtcctgagcctcctttcaccacctacaaaatgaaaattatacctatagtttgaactgaattaatttgcaaaattaatttaagaacccaaagtatatattaaatgcttaagagaaatacagcctctttttaaggccattgacaatttagggactgcccctcctcctcatgtcttcgcagacagcttttccggagcttagcaagtggtagctcgcaaagtactgaaatcttctcctaggatccatgtcctacactgctacaagaatcactgattacattggcaattcaacatttattaggtcaaatggaatccatcgtagccaggacctcagctctccttcagtatgctcagataacacctgaccgaatatgggaagaggctcattgtgtaaacacaaacgtggaagtgccttttattaaaacaagattttacctgtagaaagatttgagcattcaatttgcctcgaggtagcatctttacctggaaatgaaatctcattctgttattggagccaatgtgtttatgtcaccattggatgcaggaacaacttaaaaaataatagtatacatatgttatgattaactctaaacttttgtttactttaaggataagctaaaaaaactcactattgtcaaaaatagcttctgtaatttgttcttttcacaagaagtaaaattcttgtgttattttttattctctgtaccttgcgaataactcataacttaggagttcccaagttatgttcattcctccattgcaatctctgtcccacccttccctttctttccatttccgttg

SEQ ID NO: 1133 - DNA, 470 bp, Homo sapiens
gttaactaatggtctgttttataaaggtctaaaaacattgtatacgttgaagggcttttaaaaatgctgtacttttagccaggtaaaaattcggttaagaattcaaactagcaaaagatgattctactttggcccaaaggcagtggtttcctgggtttgtgtcatcttgctttgcagcgtgtagacaattcttcaggagttgcagagagaaaaataacatgccagattttggggtcacagtgccatctgctgaagaaaggagtgttgctcgaacaatgagtccacatgatcacaatttgcgtaagtactaggcctagccaaaaaacaaaacaaaacaaaacaaaaagaatgcaataagttatggactcttgtacattgtagtggagtgaattcctcaacagcttacgctgtattatatattactgtattaatctctaaatacattatcacttatttattcatgcattgat

SEQ ID NO: 1134 - DNA, 625 bp, Homo sapiens
gaggctaggccctggtaagaaatttaagtgcaatgggaaaacaatgaaacatttcaaacagcgttatggaaaaaccatttgcaaaattgtttagctaaatacaaactgacagtacttaacattacccagcacagtaagattcaaaagaagtgcaaaatattcggaaggtggatttgaatgatttaagtctggggaacactgtcatgttcctcgggtgccctctgcaggcgccaaaccaaattgctgcgtgatcctggggatttgctccttcttgcctctcactcctcatggccagcatggaagaggaatctgatcaaggtttcctttttaaatcttagaaccaggagcctggagcaggtgttgcaggttttggagggcacccaggtgcgtactgccaggaaatgatgtgataacctcattctcgctttgtgacaaaatctaaattaaactgggacatgtctggacaattttgtagcttacataccaattcaaacaggttttttttttctcttcattttccagtcaatatactgaccatttctgtccttatatcttcctcacggagtgttcctgatggtagtcacacagtcttttattataattttatgagttcttgttggagcga

SEQ ID NO: 1135 - DNA, 845 bp, Homo sapiens
ggcataagggaaagtctttccaaatggtcattgttgattctcctccctgacctgcaggatccacatgcttccacttgtaccccatgcttctccccggagagccagggacagtccccagctggagaaaggaccagaaacaaaggtcggaaatgctccacatcaggaaatgagaagatgctcagcagacttgaaagtccctgtaccatgcggacttgcagaacgagtttttctgctaggagagagattagctcaaaggatagcaaggtctggggagaggagagggacaagaatgatgagaaatagaatgagaaggaaaacctctaaagcaaggggaagataggggcatcagagggagctgagtcagcaccaagactgccaggagccgccactgtcctctgtccagattcaatgacactgccctgtgcccgcagactctctgcccagtgccttttctctctgcttttgtatggtctgtgtggggaactaatgcatggagaagcgtgcaccatctcatgataatgatggagcagccaaagcctcatagagcatccgattggagccatggcttctttgagcccagccaaagggatccagcccctacctccatatcacctgttagaggagacagtgccccctagcccttctgtctctggagcccctgtctcctggtgcaatttctcagctcagtgactagctaaccaggcacttggacattaaggaagcatggtgatgaataagtgggccctgcatgaggcaggcttctcagggtttcttggcagcacatgtattagcatttggaccaatctgattttattttattattgttatttacatttatgtattta

SEQ ID NO: 1136 - DNA, 514 bp, Homo sapiens
caatgtaattttaaagtcctaaaagaatttaattcactgactcttcagtatgttataacctgaacttcttggctgattttatgggcctcagtgttagacagcacctaaggatgtgtcatgttaaagcctcttggtttaacctgtctttgttctcacctgccattggccacctgctccaccccagcagctcccacagtgaccagctccacaccggccatggtgtgcagacttgcagggctgcctctccgtccagttggctcgtgcttacagcctcacaccttgttcctccacctgggggcttccctgtggaaggctgaggtgagaaaaattatgggagcctcaatgagcaacctggaagtgtctgggagtgaggtccccgtggggccagcctttgaatgggaggcaggaactggcaaataagagttctccccagctgaactctcctgtgttctggttaacacagcctcttacaggacagtccccagagagggagcaaccagtcgtgcttgatacc

SEQ ID NO: 1137 - DNA, 616 bp, Homo sapiens
gaactctcattattattatacttcagcaaaaggcaaaggttaacgtaggtgagagtttaggtcccttctggtcctaagatctatgcacctgaggattgaagtgcttctctctctcaaagcccctatgctactttcggtccccaccatacaattacatttcctcaaaattcctgctccgctgttcctcagctttcaactcagccatttctcaataaagctttgaaaaagtcagaattctttctctctttctctctctccctcccccagtttggcctcaccaagttctaaaacatgcccagatctggcccctgccttgcaccccagcctcgctccatgctgctctgtcctttctaccatgtctcaccaggctctttccctctcagccctccacccctggggtccactttcgtctcctctccccatgctgaggcctcccattttctcttagcttagaggccagctccagagctggcccccacccctcccctctgtgctctgcctcagcacctcatttatctccttcatgcacttggtaccatttgtgacaattttgccctttatttctgtctccctctccaccatttgtttcttgcagtgcttttacattgagctctgg

SEQ ID NO: 1138 - DNA, 953 bp, Homo sapiens
aaaattacattaaaagataggagtacctcctttacaccacctgaattatcatggcacataaatctcacaccctatttgccaaggccattcgttcctagctgttttacaggtaggttagctttctcaatgcaagtctgtgggacggatggagaaaaattccccgagccctttgatcctgccccagctgggccccgccgcgctgagccttgggcgcgccccctgctgcccgcggccggagccgttcgccacacccccgtgtttatgtcggtccacgggggttgcctgtccctttaattggcatgtaccaagtccttccaggtcacatttcctccctacgtcccagccgtttggactcactggccaaaagtccaagaggacggaatgtggagacagtgttgtatttttgcggggagttctaggccgaccgggagcgagagaacgctcgggggcgaagcgcgccattgcggccctccccgccgcctgcggtagtccagtcccaagatggcggccaccatgaagaaggcggtgagtggggagctcggggctctggatgctcgggcggcgccggatctcggccgctggggcccgggcgcgggatgctgggggtgcgcagctccgaagcccggcgtgggacccgaggccgaggccgaggccctgagagcggtcccgcggcaaggcctgctcgcgcctggcgccctgagcgttttcctaggcacctggccagccgaggcggggcgccggggctggggccgggagcctcgaaggacgcaggtccgcctcccgcgatgccgagggtgcccccggggagtctgaggaacctgcagccccggcctcgcccctgaggtgtgggaagccgaaggtcccgttgagtgtggttggccttgactcgggcgttgcaccggcatgatcgcattagcctcactggttatgggtagctgctgctgggagcgtgg

SEQ ID NO: 1139 - DNA, 494 bp, Homo sapiens
tttaatacaaggaaggcccgatggcagataatcaggggaagagagtttgagccatgatgggaaaagaacttatagaggggtaggtggtggccaaaatataaaggagcttctttaactttggaggctttaagagtcacatgatagatgcagtgtcctcctgtagatgtttccagtgttaggaacaattcccgatagattagcttgcatgtacacttttcccctttgccctcactaggagaaaacatatgtgtatgccagtgagtgagagtgaaacagagagagatagccctttgagtttaattaaaagcaaatcgtacaatctggagtactttacgtttgtaacacatcgtatctctcaactggtcatgactttgctggggagagtgtttagatgagatgattcagtcctctcctctctagagttctgccttctaagatccagttcttgaccataaggagatctgcactttgatttctgttcattatcctatata

SEQ ID NO: 1140 - DNA, 1192 bp, Homo sapiens
ttacccacttcttgccaaaatgcagcttcaagaaatgtaggaatgttctaggacagtgagactaaaacagaagcctctgttagccatcaaaggcactgacatcttactgtctgctgtaaatggcactccactgggcggcatgcagtatatttgactcacacatcaactttagcccttaaccccagtgggaaaaccactgtaaagatctggataccaggggccacatgtgtgctgatgcctgtggtttggtggggctacaacaggaaattcctgctttggaaagacagaaagcagatagccaaattctctctaccacattttggaaactatgtgtttgagtctgatcaagcatgatttagattcaaattcagaaaccatgtattagccttagttatgtgccaggcagtcctgcactggatccgttcatgtgaatggctctgttgagccctcaccaagacaaatacatctataaatgcctgttgggggttcaatatttaaacaaaatggcatatactcttcaggcaaacaggaactcttcagaattctctgctgtctatttgcgtagggaattgacagttctcacttaggcaaaatgacttgtgtgccaagatatagactttggtttcttgagcgtagctcagtgttccccaacttccatattcatcaaaattatgcatacggttgaacactcaaagctagacatagtgtgatgtaaaggattttttcaggctatcttctgggttgttgaggtggggcataatgcatgtgaaattgtttcttggaatgagagcctaacaaaggggaggactgtgttatattccgaccactgagctctgtattgcttgacactgcctttcaacctctgagaaataaaagttcacataccttaagtcgatggtcatgagagaccaggtcagggatggagtgtgaatgttgtgagctcattactgttactgcaaaagagccaaaagtagtgtttcagtatgaactatttttatacacacacaaatatcttttcttctttaaactagaatcaggtgctctggttttcattttataaatggaagggaaaccctaaggagagtctggttttatgttttagctttattttttaaaaatatatggtacctccttgagaatctgatgaaagcagacatcctgctgcctcttccagatgtgcctaagcctgtgt

SEQ ID NO: 1141 - DNA, 1832 bp, Homo sapiens
ttattatttcattggtactttatgttatccaagtactctttatttgcaaatttgtaaatttaatcacattaaatattaatttttaaatactaaacattcaattttcatcattttttagtaaagtagaccttattaagacatttaaacaggtcctacattataaacataatttttgctgtgaatggaatagagccactgaaatgtacagtgaccctttagccagtaagctcatgcaagttttagctctaagaaaaaaaaaacactactctgagacatttaccaatatatttgaccatgtaactttttgtttcctgggtcatcttaatgaaagaatgctccaacttgagaaattctgctctgtgccaaaagttggctttttttctttccttttaaaaggacttattaattgttctttatgtttgcaatatgtttatagcttaggaattattttatggagtatcagaaaaggttatagatttacaaacaaaccttaagcttgtggagcaaaaaataaggcatttgttatgttctgtacttcttgtgattcttgactatatgagtgcaaatggcttattgagttattgttgagaaatataaaaagctaactgataacttctccgttaaaattttacaaaaacttaaacacttctttcaggctgcagaagatgtcaatgttactttcgaagatcaacaaaagataaacaaatttgcacggaatacaagtagaatcacagagctgaaggaagaaatagaagtaaaaaaggtattgaaaataattattagaagaataaaatttttttatactatagctactaaaactgaactcagttaacaagtgaatatatatttctctgggctgtttgttgcagatgaatgacgcgatccactctagttaagcagaaagtcattttttttttaagggatatgcgataacttacagagttgttgaggagcttgagtctagaccgaggttccaggaacaagtctcggagaacttggctggcggtggaacagctgttgcctccactgatcccagagtcagctgtcttcccaatgaggaagccacccttgcagacttaggaacaccaagctgctgctgccagtgccacctaccccagtaaatctggggcctgtgtccagccgtcccccttgagttgaaatccagctcaaatgcatttgattggtggaattgaagttattatcacttatgcatgctggcagaactttcattacccgcatgatttacttacaccctatcagcaagcaaggctgagaaatgtaggctggtttttttggttttgtttttgtaggaaggcagaattcacaaagtcaaaaattgttaaaatagaagaaattttgagtgaccatgtgcctgctgtccaccacagggcgcttattgtccagaggacaaagctttaggtagctctaagtgcttgcttgtgaaatgtcttctaaaaagttacaaattaaggtcttattctaatgtggtaataatacctttgtgagagggtccctcagagagttgctgtccccaaattacaattggcctttagcttctatcagagaactttgagtacattttctttgccattttgcatttatagaaacaactccaaaacctagaagatgcttgtgatgacatcatgcttgcagatgatgattgcttaatgataccttatcaaattggtgatgtcttcattagccattctcaagaagaaacgcaagaaatgttagaagaagcaaaggtatgttaaaggttaattctgaaattagaatttatatcactataaagaacatgtaattatagatgtagggaaatagtagatgctagc

SEQ ID NO: 1142 - DNA, 1134 bp, Homo sapiens
gaaaatatctgagttttcactgggcaaagctgctctttcttacaaatgaggcactttttaccactcttttccaaagtttagctccagaggcctcaaagttagtgaaaatttctgccagatttggatcataagttgttcttcttaattattggtggttggtggtgtgagtttctatcatttcctgtagtctcatagttatttttgttgttggaaaaagctgggttagaagccagcaggcccaggataaactatttatagaagtctttgtatttggttctttgttaggaaataatttagacagtaattttttactattttttagatcagcagaaactgagaaaacaaacttgatttattctgtgataagcagatatggaccatgaattaaaaatgcccacattcagacatttagatctaattatcagtgttacttagctgcctgtccaagtttagaaggttcttgacctaaaattcttcccaaatattatttcagacacagatgctcagaaatcatcctattgaatagaattaatttaaaatattttttttccagaaaaatttgcaagaagaaattgacgccttagaatccagagtggaatcaattcagcgagtgttagcagatttgaaagttcagttgtatgcaaaattcgggagcaacataaaccttgaagctgatgaaagttaaacattttataatactttttttatttgtttaataaacttgaatattgtttaaaatgataattttccttcttcaaatgacatggaaagcaaaactttcttttttaaaaattttcatttatttaatggaaacttgcccattttcacatgtctgcttatttattttatatttttaaaagaagacagtattcacctatgtattttgcataacgattatatcaagtctaggggcttcatgtcatgttattaaaatcagttaagcaatcttttatgtttctatattatttagaatatttgttgttgcaattttcacataagaaaatttaacagttgtgtcatgttgtttctgtctgattttaattgctgtctaatgacggggaaagcacgatgaaaagatgtacaatcctgcatccttgcttatttcacaactaaagctttgtcatagacttcaaa

SEQ ID NO: 1143 - DNA, 564 bp, Homo sapiens
acattttttacatatctatcaatatcagagatttgggtaaaagaatgggtaatgtttaaacatgtggaggcatgtggagctttatacaaacagggcagaaccacagaagaacgttttagaaaccaagagatgtgcagaaagaaatgtttagtgttttttcgttttaaattttagattttattttagtgctttgtaattaattggggtttatattgataaagatgtggaagttaaacagctatgtatgtaaaagtaaggcttatttcttaaataaaggatgcatttcttcccactcccccacaaaagacaaacattttgggatttgggagacctaaatgtattaactttccagcagatggcactgatgtgccaaatgtgaatggaaggatcctaacacaacaatgagattgttaggattaaatatacataattttagaggaaatatttttaatttttaaggctaaactgcatatgtattttttggttcagtgtttataaacatgaattcaggcttaaagatagatgattatataatttctaaaattcttaatactataaaggcag

SEQ ID NO: 1144 - DNA, 1155 bp, Homo sapiens
aggtctggggatcccccagtggaagatctagcataggagggcgactaaagtttagccctttagaaatgttaacaacgaacactcgcctgacatgggccaagagactgaactatgtaattcactgggacttcaaattttgtcctgcatattatcaagaaaacctaatacaaaaacccaaatatctaacatcagtgggatggaagcgtgtgatgttgctaacttcattttcttaacttacctgtgacattttagaacattacaaatatttgattcccattttaagttcatttctaaagcctttgcttatttttgtgaatagtaacttccctgggctagctgaagactggggaacagcacgcggtgcatctgaagggaaaggaagaaatgtcagcttcagccagtagttgcgacagagggaagttttgatctggatttgtcactaacttcttttttttttttaagcaggaatcttgatttgcatgtgcaatcactctttttagactgggccactatttgttttttaaagcagtgcaggctacacaacagataattgcacaacagatctggccctgagactgccaggttgcaaagtcaggtgcataatatgatacgtcatgtgcaggcttttcacaggaagtggtagtagaagtcttctgagcagctatgctttgctgctgactgtaatgtttcattatctctcacatccattaatttctttccatctccacaactactgtgatccttgtccaagccttgtgagctctagtcaaaagcatggctaagtaagggagcaaggggatggaaaagccatttgaggtagggtttcgacagggggtctctaaagggttttgaatagaaaggagcagtactttttaataatttggcagttgttaggtgggctttactgtagaaagatggaggtagaaatactggatgttattgtaccttttctggtgagccgaatcagttggctgaagaaaagatacaccaggacttagagaaggggtgaaatgaacaaattttgtcaatgattggagaaacgaaggtgaagctagaaggagaaacccaaagagaagttggttttgagcacaggccagtacagcttgcaacaggttttctttggcttctatagtttaacaaagaaaaaaaaaaccc

SEQ ID NO: 1145 - DNA, 666 bp, Homo sapiens
gatggagctctatttgatgactaagaaggcccttatttccttcaaaagagttaacccacccctactccttacacacaaactggagctccaaacaccctagaccccctgacccgaggcccccacacctgagccccatacccttgaaccccacacacacctgagccccacacacacctgagccccacacacacctgagccccacacacacctgagccccccacacacctaagcctcacacaaagctgagttcccataaccctgagccccgaaacctaagtttccccacccctaagacccccacatttgagccccacacacccgagtcctacatataactgagtccccatacacctgaggcccccagactggagcccccatatactcaagccctcccacacacgaactccccacagagctgagtctccatgtacctgatctccccacacctgagctcccatatacctgaaccctacacacacctgagacccccatacctcagcccctcccacatctgagcccacacacacctgagttccacacacacctgaggaatcagctccctcccgtcaggcaccagtgattctcgggggtgataattgtgtggtttgaaaaagcctgaacacattaggtgctgaggatcaaaaatacatgaacaattctctagtt

SEQ ID NO: 1146 - DNA, 893 bp, Homo sapiens
ctcagcgaaagagctggtggggttcaaatcattccatctttctgggattggagggcgtgggggtggtgttgggggaagagactggagcaccaactgagaattcttaatgcagattatagtgctggagagggtaacaaaagagggcagcatcaaagagattgacccatccagtttagggatcgagggtagctagaagcattccggttgctggtagtaaacagattataaaagattaagcagtaggtggtgtgagacttggaggcagcaagtgaaaagtatttttacaagaaagttaacagtggtgggaaagaggcagagcatcacttaatgtcactgtggtgcagatggaaaggctttttttttttttttggactagggaacacatgaatacacacagtagatgagaaggagccaggaaagaagatgatggaaaagtcaacggacaagaggtaatagttggagcacatctgtgaaagaaaggggtgctgtagtgcttatacaaacggtagactgggaaaacacagaattaggtgtatatgttacaaaaactcctaaggaataaatggtagagaaaaaaatttagaatagtgatgaactgtaggaggaagatatagttggggtaggcaaaaacaggaggaggcttcaataatctttatgttctatttcttaagttgggtcatgggtccatagttattggtagtcaatatgtttattattaattattttatgtacatgaaattcttcacaataacaagtttttttataaagttctgttgtggcacaaacaaactaggaaaaatgtgcattactgtggcattgttattgatatttctgtattgcattcaactacttttttgtcatttgacataaaatggatcatggtgactctccag

SEQ ID NO: 1147 - DNA, 553 bp, Homo sapiens
gtggttaatgaatgcacaagttgtacttttgaaatttattttgttagatgattttatttgtgttctgttacttatccaaaggaatttcagatcggttctcatatagacatataaaagtatatgtgtgtatatataaaaatgtaaatatagcattaatagattaggaaaaaagaaagggagaataagttggtcacagagtccacctttcagattgatgtactctgaacctctatgtagctaagacagagaaggaaaaatgatgagtaataccacattggaaagggtgttatatatgaatatctcaggagacaaaacatctttcagaggtctaaaccttaaaaaaaattttccctcattaggcattgactttgagcaatgtatcagatgctaactttaacaaagacttcaaagcaaaggcaagagcaaaattcatatggccaattcttgtagcaattaaacagttaacctaaatccaagggaaataatttagaaagaggccgataatacgcagccaacatccacagatgtaccctgagctaggcattagatatct

SEQ ID NO: 1148 - DNA, 1016 bp, Homo sapiens
cctcaatgcagatgagattgtcacgtgctgggtgaggatggtgggtttcttctggggagtggaagaggctgtggttgaaaaagacaactgaagatgaattctttgttgatgagattatatttgtcttgttcttttttaaaaaatagccatacataaatgatttagccaaaggcatgaaatgtcatttgggttcaagtgattgtgaagcgtttttgatttaacaaaaaatcataaaatgatccagaaaaaataggagactgcaattcatagaaatgctattttgtgcgattttatctgatttggaatggggttgaggagaagtaattgatgaaatgttatgaaatgctagaatttaaataggcctgatgtaaataatgaagcatgctttcaggctttcaaaatacacaattctagtctcagtttaaaaagtggtcagttggagccaatctaaacatatatagagactgatagcagcaaccatggcatagaatacatgtttccttcaaagttttaaattacctgtttgcctagagtctgaaccctgctagaaggcctttgaaaaagcattgaagggggagaaaaatccctcaaacaacttacatagtatttgtccatgggatttgaatggctcttagctagtaactggtgtttgcaatcttttatggaggtctttaaaagcaaacaaacacataagaacaggggactgaagtagtatactgaacacattctgaatgttatggaggacacaacaggatacttacacatcttcattttgtgcacttaaccatgactgcgtgctgcacaagacaatgggtaagtgtaacatatgagttaattttggcattatggctgctattaatgcaaaaccaggacaacacaaagacaatatcacacctttccattctgtcaagaatggtgggtgcaagtgctctcaggacccagtaatagaagagcagatgaatgtaaaaccaacaggaaagccatcatcagtgcaaagaaaatgggtgcagagataa

SEQ ID NO: 1149 - DNA, 938 bp, Homo sapiens
aagaagaacatgacaatgaggaaaaaatgacaaacatcagcaaaccccagttcccagactgccaattcataacccagttcacagaccaccaactcacaggggaatctgagcctttgtagaaaccagtgagggttgaacaaagccctttaataaatagtaaaaaggaaaatctcatctttcctttggaattttaaccaaacaacactatttaacaatgtgttctctatcttcaacctataggaagaaaccctttccttaacctacacaaaaagtaaataaatctacggcaaggatttttttttttttttttttttacaacatcaatgaatggtttaaatgtgatttttttagtttatgtctttcccagttgctatcatgggttaaaagagattgcagaatattgcacaaaaggaaagaaatatgaagttgcttcaaaagatgaaaaaacagtaatgggcagatttaaaaaaaaattgtcaagaaaatatccaaacaaacttaaatgtcaccagagagtttgccaataagtccataaagcaaaaagattattaacctcaagacagagctactgttgggatcacaggaaaaccatcagctgtgcaccatttttattgacacttcagggtaaactaataaaactccccatttcaattaaattttggaaactcatgttccctttttcttaaatgctgtaaaccagcttataaccacacagccccttttttctaaaatctcctcttggctgaggacgtggagccaatggcacattctagcatttttcttactatggctttcctggacacaggcggctataagacgtgatgttaatgaaagggggaattgtaactatatggttttcatttttgcaggtgagcttgttgagccattttgaaatcaagtgctcctttagggtgtgcttagtgttccttttcaggggt

SEQ ID NO: 1150 - DNA, 566 bp, Homo sapiens
ctactatccgagaaagtgggaactgatgtcaggggctcactgcaaaatgttgaagccttaacatatctacatgtttgatgtctagttctttatagagagtaaatatatgagtcttccatcattttgattcttgcttttgtcttgtgtactcttttgatcattatttttcatagtctgctttcttatataactcaacatttacaataaggtatcctagcaagcactttttaaaaacatatataactgcaaaaaaagaatggaccacttttctgggactgtgcctattgaagaaatgtgggctttattattatctcttagttttttgtgtaaccttttaaagtgctttatagctctctctcctcctatatttatctttcatttgaaacaagtgaaaaacgggatcaattcttggcatcagaaggaaatgaatacctagcaaaactgcatcactttggaaaccagtgcaatgaataactacccttaagctttcaacaacacaatttatagttgaattctttatacggctgacatgtcttggacgtcacacaagggattcagttacatct

SEQ ID NO: 1151 - DNA, 2355 bp, Homo sapiens
tggctcttaattttacaaggtctgctttacagctttgtacgtataaagcatattgacacattgaaaggaaacaattgggaaatagtgaattaagaaaggctgtgtggctaaagaaaagatcacgtttaatttgatagaaaatggacttatagagatgaaaaatgctgtagaaatggaccgagacaaggcaacccaaccatttttcacttttacatgtgagtatggttttgattctattcaaactctggcttttctagaaaaaaaaaaaagagtaactggctagaaagttattcatttccctttatgcttgggaatgaaataaaatgtgttcctctttttgaagttgtgcgtgctttcctttccgtcgaggttacttatgaggcacatggaaataagggaatcaatttcttcctcttcttgtgctacaaacctttataaaggttgctataaatgtcataactgccttgtttcctgaaaagtaatttccctgtcattccgatctgttcctttgagataccatattattggtctatgatgatttctttaaagtgcgtcaaagtatgtggtttagtgtatttttcttatttcactgccttacagtgaatttctcactcacttcaaggcttgctcctaagtcaccaattattcataaaggattgcttgattttatcctcctaatgaaatgaattaaggttgaagaaaagcccttaacagagcataaaatgccaaaaagaccttaggaaattataagtccttccagctaaaatgtgaatttaactacaagaagaggaagaagcaggagaaagaacatgcttagaaatggtggcatgatgagtcctatagaggtggacagaggggaaaggaagagtcatagttcagcatttatggcttccgtattgtcaatatccatcagatgcattaaaaacaatcctagaaacgaacagaaaggccaggaatgcaacagcaatcacagtgatggtcctaaagcatctaaacctcctctgaccgcacagtgtctctgataccatgaagagtagaaggacagatgagcatgagggtaaatatacatatggaaaatgtttgtttttacttgtacaccaagaaatcactggctcaagctcacaaaatgcaatcatattttattacattttccagttattcaagactcaactataccagaaaacatcttaaaaaacacttttaaacaggatgtgaatgctttgtattacacagcttaatgtaattgatttagagtccatgaggaaaaccaattttccttttttttttgtgagacatattgatttaagggaaaaagcagtaattgattgtatctttggagatcaaaggtgagttgatgagagaggaaactggaaaggagagagaaaaagacatagatagaaagagataaaatgaggtctgaatataaacatctatttctgagatttaacttattatcactaagttttcattttccccaaatatttctcttcaaggaacagaaatcattcggattcagatctgtgtgcatgcaaagaatctgtatgtgtgctctttggctgagcccatttgtaaaataaacaagaaacatagagctgttaagaaataagatgagccaggacttacaggcacagatgtaccctcatcttttggatatttatactgagttttcttaagcactcaaaactttggaaggattttaagatgcttcatagagtcatttgtctaattggatatctaggagagcaatatctaggaagaatgcactcatttcagaaaacgaaaagttatttgtaattataatagcgggcttttctgcctctttttggaactggtagtgagcatgctggctcagttcctcaccctatgcctccttttcttgcttttaaatcttctccattatctcctttattatctgctatttattttactgaaggtaatcactgctttattaatcactgcttgagtaaccacagtgggacttgaaatgagcttgtttggattgtaaaagtcacaaatgctggtggacctcttgaaatttccctttttcccttcacttttatgagaacttccacgtgtagaaatgtcatgggcgaccagaggtggtttagtgtttctgaagcttggagaaagggaatttgaagatacttttcaggtagcatacacgtggtgtgtcacggtaaaccataagaaattctcattgcttacatgaaagagacttggtttgcttcaagagcaaaacaataaaaatggtttttgaaacaaaagtaatttaggcatccagtttgtttttcggaaataaaaactcaaatgtgaattcattttgaagctggtaattacattttgtttctaatgtag

SEQ ID NO: 1152 - DNA, 590 bp, Homo sapiens
atgagtcactccaatgaagaactttaactggaaatttggtgtcctacggagaggccgtagcatgcaaagatgccagctgtcctcattgatacttctacctacccttccatctgtgctcctgcctccattcccaccctcagataaggaaactcaggacctctagacatgtcaagaacatacttgagttgagagacagctctccatatagacagctctccatatagacaccaaagtttgtagccagatttttttttttcatttttttaatctttcatctccatggtgttcaatgaacccggaacataaacagacagatggtctgagtgggcgggcattttcacttaatgctaacacagttgccatcaatcccacctcttaaactaataccacctccctcttaaattaatgacgtcacaggtatgcagctccctgcagaccttggcaatcacatgggaatctttttggcacttctgagagataagatctatggaaaaaagtctcagaatctgcaaatcttttccagagaaaccttatcctgttaagaactcttggactgatagtctcttgataactgacagtgaaataacact

SEQ ID NO: 1153 - DNA, 801 bp, Homo sapiens
gaatgggcaaatgcacaaagtatggacgaaatgagtgctctgaaggttgtgctctttggaacctctgccactggcatcatttcccaagtgaaaaaaaaaatggctgccaacaacgcagacaaaaagctaagtgaaaatgaatacaggatctgtctctaataaaaacagaaaaagaattatgcttagaaatattcatcactggtgcacgatgatccagatttcaacagatcaaccttgatatgctgataagagactatttgtggaaagactgaaccttggaggccacactgcagggctccaccggagatatgacaattgccaacatctgtatgggaattaagggatggagacatgaggttaattgccagggctttaagaggcaggagaggaggaggtggaagaattataagaatcatggtgctgttagtgggaacagccaaggctctggagttggcaaagaagattaagctgcgggtgacaggcaggtggagggaaacccagcacatcccactggctcaaggtgacctttctttcttttcttttccttttatgattaaaggacaatcatgcttgtggttacaactgtcaacagaaaaggagggtagaaattaaaaagtctccaaacttccttggttcccctgagagagttcataagattgactttgattccagacatttttctggatacatacagtgatctatcataaatatctaactagcaggcaaatttttgtgtttccctcacctcagggagtcctcttacttccaagtctttccaaagtttctcatattccagaaaac

SEQ ID NO: 1154 - DNA, 1505 bp, Homo sapiens
gtgctcaccgccttctcactcacacagatgaaatctattaagtttataaatgtaaactttcaataacagtgtgactatgggacagtgatatttaagggatattttaaagggtggtgtagacatgattcacatgttatttcacaatgacatgtcattgttttccttcttcttttcagcttcttctctttcatatttcagtatgaaatagaaaatccaacaaccctgtttccattgaaaattgccaaataaatcatcagatctttctttttagaggcgttgccttcactatctggatgtaataattataacaactgggaacctgattcgggctgttggcttctcccgacatgttcagtcataatggggaaactaagaacattttctatttccttccagcatacagcagtattaagaatcctaggaaactgacaacttcccacttctatagcatctgaaatacaacccaaaagaaactgagctcagatgtggcctcagggttggacatttgaaatggcaatgcatgggtcttggctcacagctctcagaatcccagctttgtatgtgtttcccttggacaatgtatgtgcttagtagatgaggaggaaaccgcatgcttctctccagctcggcggagaaaaatatttcttctctttttccttctaatgatttcattagtcatattgtttacattttactgaaaaaaattatatcccccctttaaaatacttgagcattgggcagttcatgtaaataataaatctgcctaagtttacaaattcttgactagaaataataaacctgggcgataatagtaaccatagaattgaacagcttttcccagaggggcactcagtggggaaatttggtaattatagttagcaaatggccctttggcaacagaatgtcttttttaaaagctcaacaaaaataattctggggaaaataaaaaggcataatctgtgaaatgctgaatgtaaactataccgcatgacctaattaagaggactgctatggaggatttttccaaaatactcaataaaatgagccttattatggcagtttgggggaaagtaagcctatttgtttcggaggtgcaaatgccagataatataatattaaaagaagatagattcaaaagcaaaagagattactgtgaagagcagataaatgaagtgtaagcacatttagtgttaaagacaatttttttttcactgctacaatatctggtactgcagacacatggaaatttaaaggtttttcccccacagtggaaacgttatgcttagattgcatgttgctcatctaatatccttgatatgagctttaataatattgaaagacttgctattcagctgcctaacagttctaaagtggatatctggcctagccaccagattgaagaatgtgaaagagcttattcagccacgttaatgaacaaagtcaatgactactccgttacttcctgtcagttcactcatccctccatccctcctcctgtctacgtt

SEQ ID NO: 1155 - DNA, 434 bp, Homo sapiens
tgccctgtggacagctgcatttcccagggctctctgtttccacacgggagcatcatcatggcctttctccccaagcagtgggtcactggggaggagagctggagtcacagagtacagtgtgagggagggaaggggaggggaggcggcctcccaagggacggttcctactctgagccaagccctcagagctgagctgaagtctggaagtttggagtcttccatttctgtttgggctctgccccccaaaccagctggcgactccaccccctcctgggtccctcccaatccctattccacatcccctgctgtgtggctccctaatgcctgcacctacgtgtcccctcctggaggcaacactatatatattgggtgcaggggcgggtgggggtgggaagggacagagaagtcagagacagccagtgcccagtgcccca

SEQ ID NO: 1156 - DNA, 946 bp, Homo sapiens
acagtgccccatttctgaccttcacagacatcccccatccaagaacaagaagctgaaaatgccctcagaaggtcagagaagcagagggctcttctccccatccccaacccaaaggtggacaaaaccttagaaggtgagagggacacagagacccctttcctaagcaaaggaaagaaatctgtcaagtcagcagctgaagcccagagccccttcgcaagggaaagactttggggtgatggtgggtgggatgcagaggggtcccctggacattggcgggacgtagtgctgactgtgatggcagccacgggtttcttgggccttttcggtgcatcctccccgcaagcctccaccacgctgttccaggtaggctgaggttaggcccactcagggcggcaccttggcgcaggacacctcttccgtttgggctttccgtcctcgtgatttcgctctccatctgacagtcatccatggtgacagggtgtgtccctttcccctaaacaggatcctcaatgcccatcggaaaacgttgtaaggcgttgagcccccaacgccccctcaccacaagaccctgctgtgaccatcttttcctggtgaggagagtctgcacgggggagcagggcgccataccccagaaagaaacctctgtgcctgggagtgagggactcgctgagtaaagtgaggtcgaagagggtggagaggggtagggtcccagtcaccactgtcctgaacccacagttcagtccgggcccaagatggccccacaggagcacagggggtttcgggcgctgcaggtggaggtgaaggaccagctgcggtgcggaaaggcctgacccgggcggcagatcgcctgcggagagaatgaccggctggggtggaggcggggctggggtggtgtgggcgtggctggggaggcgtggctggtgtggtaggcttaagcagtgagggc

SEQ ID NO: 1157 - DNA, 708 bp, Homo sapiens
cggaattgcgggctgcggggcagagatggtgatggcgtccggggggcggggctgggtggacggccggactacaagggacgagaggctgggcttaaggtagcagggggcagagcggattgcccaggggcggggcgggatcggggacaaggctcaagtgctgaggaccagacatgcgccggaagcccaagcccggctagcgagtaggagggtggatggtgggggatgataggctaggcttaagatggctgagggcggggatacaaggtggtagggccagagatgggctggatggggcgtgatcggcctcctcctgggagatctcagcccacctgagtaggcttcttccggccgcaagagagactggggcctggccctgatggaatggccattctgagcgtgaagacctgcgtccccctcccttcaggaagctccctgtctctcaaatttcagggggatcatcacttcccatctctctgccaggttgatcgagttctggatctacaggagccagttctgagagggaggactgggggtaggaacggggtctttgaatggctgcgggactgcaggagacttccagcaacctcagctccatgttggaggaacattctgtacctgctgggtgctctgtgtggtgagggtcagggatgagggtgagggccatccctgatgtaccaggcctactaggttaggcccaatggtaccaag

SEQ ID NO: 1158 - DNA, 456 bp, Homo sapiens
taataaaatacaattttactgcagaccacttctgaagttggtggctccctaaatgcaaagcatcctgtgatgctttttctccactgtgcagatggaaaccatcctggactagaatttctttcagggagagatggagcccttctgtctttactttgagctgctcagggggttctgaggtgaggagctgaaagtggtcaggccctgatgggactctgtggccttgacatataaggagaccaaggagacagatcctccttacacctgggagccaaatgccttgacactgctctgtgtcctgtaagccagcctctccatctttcgggtgctggccaacaacacttggctctccagatattttattcatcagggatccccagccctgcccgcccatggctagggaaggcaggatggggcttgaggacaagcctaggggagctggtgaaaatacagaatagt

SEQ ID NO: 1159 - DNA, 781 bp, Homo sapiens
tacagaaaagctccaacacatgctcccgtgcatcagcaggggctcaggaagaggtgggttgctgggaggatcacctgacagaagagagttctctgggtttgggctggaggctggcagtggcctccttgcccagacagggctgatgggtagggggattggcagtggaggggtgggggcagtgagggctgacaccttgaagctggatgctgagtttgacacacttagagctgaacactgatgtctgttcagccagagtctggggaggtcttggactccaaagctgatttgggaatttgggaagaaacattaaagctttttagagaataaggaaagagtatgggagctttactctgttcagaaaggagaatttatggaagtatagctcacaatctatgatctgcacccccaaacatccaacctcccatatgagagataaaacacagcatccctaggaagcattattcctgcgcctccaccaggcagtcatgccccagcccagcctgtcttcatccctaaccattaccattccacctccttttgttcagggcaggtctgggaatatgttcatgtgagggatcacttcttgcaaatgctccagttatcctgcacccttcaagtaggctccaaatcctacaacattctccttgccctcccaactcgcagggtgccagcttcttcccattctggccagagtttgtgacttccatgaacgcccataatctacttttctctgttttctctgaccccatgctgagggggaaatcaacaataataaaaagga

SEQ ID NO: 1160 - DNA, 382 bp, Homo sapiens
gggaaaatgagtaaggaaataatgccctgtcccaatgactgtgtctgtctgcagtgcactctatgggtcagagagacagcaatggtcccacggggcaggtgcctggggcttcctctcctaaatcaattctctctcctgatccctgtctcctaacaaccctacatagtcacaagcttggtctctaaatcagaggtgatcattgtccatcactaccttaattgaccaccagagggaggtagagagcaaagtttaccgcctgcctgagcagcactcaccgcatgaccaggtcctgcttccttattgtctcttttaattgacctgaagcgtccttacaaggcagtctaacttaaatatccgccagtacaatttaaattctgcccca

SEQ ID NO: 1161 - DNA, 729 bp, Homo sapiens
gaggcagggcaccctggatgggaggaaggagcaccaccaagacaagcctaaatgtggatattttcattccaaaagcacaagaacttcaacctggctgaccccacaagcccatatatctcctccctgccttgaactcaccaagccccctgcttggaataccagtaggcagtctgagggaatgggacaatgtggtgcaggcagggtcgggacgacaccaggagtgtgaggacaggcccggcagagtgctctgagatcagactgaaggcgggagaaatgagagaagcaagacttcccggtcagaggagagaaagctgactagatgggctttgcaggtccttggggagagcagagccacgtgtggcttttagatgccactgttctccagatctttgcagaatccactaaactaggaaccttggcctgcagccagtgggagaagggtagtcactgggaagaaactcccaaaagtctgaccgaggcaatgctaggctggtgagagggtgggagtgggactatcttccctggagctgattaaggcataaggagactgcacagcctcaggactatatgctgaaatgcaggcatcacgtcagtgtagtggctgagagatacaaggaggaagaggtggaaatccaggaaaacagacagagatgaaaggactataacacacacagcaggtttctatgtaaatatgtgcttgtgatagggaccagatgactaacgacaacc

SEQ ID NO: 1162 - DNA, 1575 bp, Homo sapiens
tggaatttactcttcacagcattcagggttgcgtttctttttccatgagtggtactaagaagagcctcaaggtgggagcaggaaggctctgctgtgtcaggttatacctgcacatatgcatggccacatggcccaacactgtaagggccttgcttgtaagtcccttattctgtcctctagcaatgtgaccatgtaggcaacatttgaaattcctttaaaattccttctaggcagagatttaagctaagaggaggacctgagtgacctctggtgcaacatctgaaagcccacgacaagcctcctgggcttttccatgaatatcgccgtgcccctgcctacggatatgctgatgtgtgtatacaatattctgtgagaagcagagacgctgaacactaaacaacacaaacccatttggtctaactccatctctgcctactcagacatctgcttctagcggtatcagagttatgtctatgtagctaaaacaaatggagtaaggcagcaatacacacaggctgacaagcccaggatggagggcggcactgcagatgctctgctctctactggaatgtgtggacatacaggaatccctatcccaggacacccgcagacccccaccatgaatccgagatgctccccaatgacggtgatgatgacagaacagagatgccatccctggtcacacacacacacacacacacacacacactcccactgcctccctctgcacccctcccaaaggcacctgccttcctctcctctcaatccacaagccaacctccagctgccacctctctatcagccttggctacccccacccacgctggcacctgcctggcagctccctatccaccccctcagccctcaggaggccagggcacacgtggaacaggttgatgttgttctccaggaagtggagtgggaggggggtggggtcactagggcaggcggggtccccggaagcctctgtccctgcataaagcagcctgtcctggcaagggatggtcatcctctcaacctacagacccagtgagccctaggccctcaccccagacccagctgctggataggacccagccccgctcccaggtaagaacttgatgacagcagggaaggcaggggtgctctgaggacacaggaagatgggtggaccaagaagggaatggaactcccctagagtccagtgggataagtatcccgataggccttggggagggaagggagaggcaggcctgtggacatctctctggtgaagaggaggctgctgttgcccaagcccttcccaggtgcacccaggtagcaccaggaggttgtcctgccccatcctggccctcccaggaatgagggtgaaaaaaaaaaagcaccttgaagctggcagaacagccccacgcatctgtgccgtgcttcctgccccccctgctgctgtgaagtgcctgtggtggatgtgggatgcttccaagccagctggtgtggcctcttccacccacggggataactggggtgtgccgatcggccacccagccagagcacctggactcaaacttcaaagacagagacttaagatgttgaccctca

SEQ ID NO: 1163 - DNA, 560 bp, Homo sapiens
gagacaatccaggcatctctaagagctcctcctgcctcagagccgggtaaactctctctgcaggggcccagcctatatcccgggctccttggcagccttggcagccaccttgacactctcctgtctccccacctccacagagacaatgaccatgtttgaaaatgtcacccgggccctggccagacagctaaaccctcgaggggacctgacaccacttgacagcctcatcgacttcaagcgcttccatcccttctgcctggtgctgaggaagaggaagagcacgctcttctggggggcccggtacgtccgcaccgactacacgctgctggatgtgcttgagcccggcagctcaccttcaggtcagcctcaagcggggctgggaactgagggatactgagggacaggggctgggcacctggcctgcaaggaggacctcaaagctccctctggccagaggtgattagatgtcatctagcccaaagtcatcatcaggagctgaggaggctggtggtcggggggatacctctcagctcagcctcttttatttatttacttgtttg

SEQ ID NO: 1164 - DNA, 468 bp, Homo sapiens
agcccagccccttttgtcttttccctcctgcagacccaacagacactgggaattttggctttaagaatatgctggacacccgagtggagggagatgtggatgtaccaaagacggtgaaggtgaagggaacggcagggctctcgcagaacagcactctggaggtccagacactcagtgtggctcccaaggccctggagaccgtgcaggagaggtgagagtgggcgggactgagggtctcccgggatgtgggtggggcagtgcatggaaatggtgcttggggccttgagctgaaaggtaggacccttgcactgacctttgccaatgtggtcatgacaggggagctcttggaggcaacccttctggcccatggctgcatccaggccatttcctagtcacacctcccgctgctgccaccgtctccaggaccacctccccactgtcacgcatgcacagggaagatgatgtcca

SEQ ID NO: 1165 - DNA, 481 bp, Homo sapiens
caatacactagaaaaaggagggatgtgtcttaactgcccccagctgagacctgagcactgtgttctgctcccataaatgaagcctcctgcctgaccccaatacacactaagcacgccctcgggaatgctgccccacagcacaaagggtgtggcaggtgccacattgatgctgggcaccaccggatgtttggcttgacacgggaactgacttttaagtagttaagtagtggttgaaagaaggaggtaaggactgtgaaggccagaaggaaaggctggggtagtcatccagcaagcatgtatatagtaaagcactctactacgggctggggtgcgcctagaacatctttgtccaagaaccttgcagtctaggaaggtgaaaattttaaaaacctgtgcaacagtaattataatcaaagccaagaagtgctaagtgctgtagggatggtttgactgagtcttgtggcaggtcaaagggacttct

SEQ ID NO: 1166 - DNA, 352 bp, Homo sapiens
tttttttgatatatttgccaatgaaatgaaggaaaaaatagggtagtaatttgagggagtggcatgatcaaagcaaacaaatttgttaggattagggagtttatatatggaagcagacagaaggagcaagtggagaggaggaactggtgttaacagcaagagagagcataagatgtggagagaaaggatcccagagagatgaatggggaggaaagagggggggagcatctacccccgggatcccagagagatgaatggggaggaaagagggggggagcatctacccccgaactggaggaaaagggggtaagaagcacccaagaggccctgttcctggccaggtgctggccca

SEQ ID NO: 1167 - DNA, 777 bp, Homo sapiens
cacaggcttggaaaagccaatggaaataaggaatggtctccatacctctatctattgcatctaaatattcaagggatgatttgggatttggagccaggagtaggggttagtcatggaaggcgtcctgaaagaggtaagcatgggacagatggtgaagaggaagaaggagccagggcttggatggaagctctagggtgatgtacaggcaggagatggagcaggtctgcccagttcccttcatgcatctgaaccaggaactagaactgacctgactagactctactgacctgaaccaggtcactagagggaaaatcagcagaaatgagcacaaggactttgaagtccttcctcagagtccagaccagggacaccactgaaggcttccagcttcttatctccctgaaggctctcagccctgaccctgcacctcccccaactcacgctcccaatatctcatacttaagatgtccagagattcacaaattctcattgtctaattctagggatccataaatcacaaggaggctgtaaccatccccaagggctgcgtcctggcctttcgagtgagacagctgatggtcaaaggcaaagatgagtggggtgagcagagacccgcatgttctccccacaagatgagaattacctgcaccagtactgaggcaccctggtcccctcttgcggaaatgtcagagaatgagtaggggggtgtattgtactgtgatccgactgcagccatggagcctgctctggagagaagggtgaagaggctcctggatt

SEQ ID NO: 1168 - DNA, 942 bp, Homo sapiens
agagactggaatggatgatagaaagtagtgttctcatagtagagaatttatcaaggaagaaaagattgcttccagcaatggaggttgaagctgggaattaaatgaagcatttggggtgcaaggtcctagcccttagcagagccctttggcttgagactgaagaagggaatgtggggcagctgctaagtgtcctcccaccctccctcccttgcccttcacagatattccacatatctgcaatgataacatgcaaaccttccctcctggaggtaagtgaaattgcttacgggcttcccacatcttccgccctacccctgacattatctgccaaaatcctccaccctctcctagcttatactataatcccccaaggagcctctgcttttgtttcccaagtccctaagaatacctagcctcaactttagaaagacagatagaggcatataaatactgtcccagagagatatagaaactgacagacagagaccggaaggcacagtcagaagcagaagtaagacttggagactgagtgtgttcccgaatcatgggggtggatgagctagcataatctccctgtgtttttataatgatcactgatgaaactgccttgaagactgttttagatgaaaaggcaaaaatgggttttgtgctgacagatgtgcattttttctgtcttcagaaaagtcaggagaggagaaggtcatccgtaagtgtttcctttcattccactgaaactttcttgactccaaattttaaaactccagtctttttctttccttctgacaggactgacagggaaatagcagagcgaatctcagcaaataattgtccccgaaacatggcagaaattccaatagcttgggaaaaagcagtggaaaggggggagtctttgcccaggtggtctgacgcctgagacctttgtcctcaacagccttactagca

SEQ ID NO: 1169 - DNA, 1525 bp, Homo sapiens
tagaaaaaaaaaaaaaaaattaagagtcttagtagctataacctgctacacacacatctgcaactcggccgcccagcaactggggccagagccactgagtcacagtaatgccaggaacaaggtagctgggctctcccaggagacaggcaggatgtatttcctcatcttccttagtgtctcaacccctgggtatggctgccattctgaaggattgcattcttatcttttttttttcctttttttctcagttatccaggcatctgatgttggtaaggaactttgtgagtttctcccaagactttggcatggaggtagcattaggggcagagagaggagaaggcgaagtcattctttgtcagctaactcatgggaagggaaaacagactttctttctccactttttgctggagtctcaaagaaaagtcaagtgtgtactgatatgggataaggcctgggatctcaggaagattaactgttgggttagatgatacatgcatcctggcccaccttctcgccccaaccctcaggttagggttggtggatagttctgtcaccgcattccttggtaaagaaaaatggggccaggctcaaactggggggtagagcatgggtacctaaagggggctgagtgtaggagccctgcagggggaatgctgactggagaggaaggtgcccgatggagggctgtgtgtcccattattgtccccataggggacgtacacgaaggcttcaggacactaaaagaagaagttcagagagagacccaacaagtggagaagctgagccgagtagggcaaagctccctgctcagctccctcagcaaacttctagggaagaaaaaggagctacaagaccttgagctcgcagtgaggacctagtggaagtggggaagggtgggagaaggcatgttttggtgaagatttggtgggggcgggtattgcagcaggtagggagatctgacgggggcaggaggtgggtggccaggggagtccaccttagataccttccccaaggctggccacgtgccccaaggctgccaggccactgctcctccctttgtcccctggaaaagggcaaacagtgggttcccccaaggcacatgctccctctgatggccagaagggacttctgctggaggggctggaaccttctctttccagagtccaaaactcaggaaacaaggaacccaggagtccagtactcttcaggacatgaggcctcgaaaaagaaatcaggaaatggagagagtttccgcatgtcaaggggttattatgtgctgggccctgggttgggccctttcctatgttatcttcaatagtcgcccaccttcccccacagcttgaaggggctctagacaagggacatgaagtgaccctggaggcactcccaaaagatgtcctgctatcaaaggaggccgtgggcgccatcctctatttcgttggagccctaacaggtaagtggggaataaggtcttcatttatagaccttttcagtaataggaatgaatcacttgaatcaattccca

SEQ ID NO: 1170 - DNA, 475 bp, Homo sapiens
ttaacacctgcgttgtaattacatccaatgaatgaaggctgaaattctggaagtgcgctatttggaggctgtagtcccctctgcaccagcaacacacatctttctctgctttttttctccagagctaagtgaagcccaacagaagctgctggtgaaatccatggagaaaaagatcctacccgtgcagctaaagctggtgagggaaaaacagcagatgctggggagagtctgggagtagctgcagccagtggagatgcagatttcgcctaaggatggagccattctggaggatccctgtcttatcccaggggcttatgcccactcctcctttctctctctatttctcattttttgttatttcacaagaggtagaagactgaatttctgggcaataatctgggtttattagcctgatcttgggagaagagacagaaactgtggctttgcttattcctagccaaatattgtaagcaaa

SEQ ID NO: 1171 - DNA, 578 bp, Homo sapiens
taaagtaaggaattctaataaggggaatgtaaccttcttgtgatttttgtgagttaggagaggagagaggtttccagttctttcttttcatgctgttttgattccctccaggtggagagcacgatggaacagaacttcctgctggataaagagggtgttttccccctgcaacctgagctgctctcctcccttggggacgaggagctgaccctcacggaggctctagtcgggctgagtggcctggaagtgcagagatcgggcccccaatatatgtgggacccagacaccctccctcgcctctgtgctctttatgcaggcctctctctccttcagcagcttaccaaggcctcctaatttgccttttacgtctgcttcatgactccctaatgccttcccaacctcgtggtgctgtgtccttaccacctaagggcatttcagagccatcagctgaagacatctgaaatctcagctggtcacccatgataaccaacttccacctgcccaaccatatatcaccccctacccctccagctccgcaacccactaagcccatctgctgatgcttaaattttctttac

SEQ ID NO: 1172 - DNA, 808 bp, Homo sapiens
tgtgcttaaatattctaggagtagaagcactcagacttttaaaactatgagccgtttcagcaaaactgagaaaaaaagaagattaattaatttcctatcctaatccctcctacttatacttccccaaaaaacaagctttactggaattaatggaaaatattatgtcaatcttaggaatgatatgtcttttggtgtttttctttaaagaatttatcatacagaaattcttaatttgtgccagaaaaagaaattgttatcatactgcatataaatcatatgtacatgaatatgatgctgtactgtcctcaggcaaactggaaaatgctcagagggtatagaatgtggaatccagatttttttttctgttcaattagttttctttaatggaatctagagtctcaagtgagaagatatcaaagcagtttgtcttcaaagaagagcatttgggagtcccctagctctgggttgagggaaagaccgagagatatatagtagaagcccgaaacaaaaataagacagatttcaaatttattgaacagaaaatgcagatgggcctttaaaaaaaagggggacccaagaataagactaacccaaaactttaaaaactaaattgtgatattatttcacctttctctgttctgccctgaaatttagggttcttgtaggaggaagtagtgtgggtaggcttggcatattactactaatatggatattacaatctcatcaaaccgctgggtttatatcatcctcctctgcctaaaagctgggtttgaacatctttcaccaacctcttttaaagcagtatcag

SEQ ID NO: 1173 - DNA, 1964 bp, Homo sapiens
gttttatgagtggaagaatttctctaaggattttggtccgtggagtcagactctcccccagtgtcttagtcaccccctgcccagcctggttccctcatccaccaagaattcatgaccaactgccagaagctttgtgttatgccgccagcctccctgatcctgagcaccttccaaagcctcactctattgctcatggatatactgggttgttatctgctgacttggttgttttctccttgtgatgtaaacttaatagagagatgagctaacaccctaactatctagaagagtaactcctttgattgttaaggatgaacataactcatctgttttcttccttaccattctcgcccaccttcagttgcagatatggtgttatgaagaggttctaatgagtttattccaatgatgattcaaaagtcctgttatccaccccccagccctggagggtgagaggacagttgaggaggaactggtcaaggcatgttccctaaaactagagcacatatctttccagttagcgagtggctgtttaacgcaaggaacatcctgcaatcctatgaaagaggatgcaaaagatatgcaggataccctttatatatgcaaaggaggaggtcaaaacatatttcctgccttctaggtccttacaacagggctagattgtcttgtagggtccgtgaaaggtctaaaactcaggacttccacttatgggagagagaaaagtttcaaggtagggagagagtttttgttgtgtgttctaagaaattgggagctatatccttcaccttgtttcaccttccctgcagaaccagtggggcagtcctttgaaaaataagtgggtagggtttcttgtccaatttgcttccccttaggtacaccactaagtaaaccatcattctctccttaggcacaccattattctgttccccatttcacaatgtctgtctggatgtataaaagccctctcaatgggctccctaaagcgtctgccagtaggggctcccaccctctttcctcaacactcccaatccaccgcagcccagagcacagtgtctgcttatctaaccatctgactcccccgtatactacattcttgagctgtttttcacccccctatttgctaaccgtgggccgtacatagggtggacccctatattttgttaaactggagtgattctacgcaaatgcacgctcctacctatcggcactcccagcctgcagaaattgtatgccttatgttcagcactaaactcaaatctaaccaaggaagtccggatcccatagggttcttcctactctccagttcggtttattttaaggccaacagccctagcttcacgtccctccttcacagccttctttccttccctcctgccggatgcgcccggcagccgttgagcacaagcccagcggatctggaaggagaccccgccgcgaccggggaaaattgagcgaacttgggcgcaaaacccgcccggcaactcgtgacgtcatctcgtcccgcgctcggataggctgtacccactccacgctggttgaggcgctcttaaagtcctttgtaacccagattggagcctgaggggacctctcgtggacgcccacagaaatgcactcgagaggaacataaaagcatcacacttaagcgctcgaaagaaagccccacgaacccataaaggctcctccccgctccttcctcgaagctcctccttcatcctgcacctcggctgtggatttatttcccctttgttgactcggccatcggcctgccgggcctggcgtttcccagaaggcccagcgccgggaaggggtttgcagctgctccgtcatcgtgcggcccgacgctatctcgcgctcgtgtgcaggcccggctcggctcctggtccccggtgcgagggttaacgcgaggccccggcctcggtccccggactaggccgtgaccccgggtgccatgaagcaggagggct

SEQ ID NO: 1174 - DNA, 1583 bp, Homo sapiens
acaaggcgaaaccgccgcccggcggaggagaacaagaacccccaccgccgccggccccccaggatgtggagatgaaagaggaggcagcgacgggtggcgggtcgacgggggaggcagacggcaagacggcggcggcagcggctgagcactcccagcgagagctggacacagtcaccttggagggtacggcagcccaggccgggaacgtgccgcgatcgcgggtgacagcgacccctgtgatttggcttcttgctgggaagccacagcagcctccaccaccctcagttctttgggatcacccccagatacctgctcccactgccccgacactcccgactccaggcccaatgactgaaccttctctccaggctgggaaccactcccctcccatcccctccatccccatatctggggttgcatctatatctaggtcccagtgggcctggggactccctcttttaagtcctcccctctgacctattccgtttatatcccacccgactgattttagcgcctccaatatatgactgattgttcccgctggaaaccagtgtttgtgtctgtgtgtaaacagggccaggatgacctagaatattgactcctgagttttaaaactgtacagcagatttttgttgtcctagctgcctttagcacactcccccgaatgaaccatttcgacctagtatcttgtttcctacttctctaactgaagtgtcccaacagtccccttgctgtctcctcccttcaggtccttactgcccctctgtttctaaagggtttaagtacatacacacttaaaacttttcgggtgtcatctttgtttggttttgtaatactcaacctttggcctaaactcctatataccggtgtctcctatttcttttctccgaggttcctgtttcgagtgtctgtagtcctcttgttcctccaagttcatgttttacttttcccacttacagcgtcctgtttccatttgaagtgggcaaagtgagagcttcccactgtgatcctggtgccattttcctggttctggatcaagtgggaccagactacttactaggttttcttttcactaaaatgcgtgagaaactagctcaaaaacattgagataagcaaagttatcctcctaggtggtgcttttgaggatgtgatggtgttgactacatcagctcttactgtaaagttgagcaacaggatcgatatttaatagagatccttttacctaaagtagtggcagcaatgtcaaaggtgccactcagcattgcctactgggtgtgtttattacaggcacttcattttcttcttgtaaagtaattcatattcattgcagaaattgtggaatgtatgagaagttaaaagcaggggataaaaaacatggttaacattttttcttgtgaatttttgagctgttctcctataattgagagcaagttatgtatacagtttgtatcaaggcataactaaatataaattttgaattttatgtgttttcattaacattcgtaaacataatcagcattcaatttattccagaaacatttattgaatacccaatataatggttaagagtacaagttctggaa

SEQ ID NO: 1175 - DNA, 644 bp, Homo sapiens
ctccttgcctggagtggtgggggactaggagtgaaagtgacatcattttcttctctgctcttcttcagacatcaaggagcacgtgaaacagctagagaaagcggtttcaggcaaggagccgagattcgtgctgcgggccctgcggatgctgccttccacatcacgccgcctcaaccactatgttctgtataaggctgtgcagggcttcttcacttcaaataatgccactcgagactttttgctccccttcctggaagaggtgagtgagtcaggccaacttaaagggtgcaggcctggcctcagatccccaggaacagcattgttttccatcctaaagtcccatcttattacctgtggtagcatgaggagagaagccaaagcagtccatttgaatactcatctgcacagtgacaagggaaccgtccactgccctgtagtgtcattcttcaaagtcaggggatcaggaccctcccagccaaactcatttcccactaccctgcaacctgtaccccctactccagttgaggttgcgttgggtgacctctctgttgttctaggagagagaaggtgctgctgcctctttcttctgaagcttcaccatggaggaggtagagaacagtggttaggaggagcacagctgtcag

SEQ ID NO: 1176 - DNA, 669 bp, Homo sapiens
agacgaagtcagtttggtggtggtggtggcgcctccgtgccaggagagacctctccttatcctctgtagctgtaaactctccctcatgattcatggcatgggccaggtctcagccttctccaattccactgaccttccagcacctgcatttccttaaaatcctgtatactcagtcagctccgtggatggggaaactcagaacatccctggaggcagggcagtgaagagtttcttgtctgggaaaggggaaaagcgtactgttcccccaactccaccttgaatattttctgaccttcacatcgctaaactcacgaaacgtgattattttgggggtgactgtaacacattattttttccagtgtcagtgacaacataggaaaatatgttttgtttatatgttgactttccctaaattttctttgttcccacaagaaaccattttttggtctcattattctgatttcatctctagaattatttcgttcagccctgtccagtagtatttgcagtggatccaggtgtggtggtttaatgtctccacttaggttgtagcctctttgaaggttccttacatcgtcctttgtctccattatgttgtgtaaagaaattttttgttctcctgtaacactttattgtgtttattaatattatattgccagcctccttgac

SEQ ID NO: 1177 - DNA, 453 bp, Homo sapiens
atacatagtggatgctcaataaattcttggttacttgatcagactgagcttttccatggtaacttctgtcctctcctagcccatggacacagaggctgatttacagttccgtccccgcacgggaaaagctgcgtcgacacccctcctgcctgaagtggaagcctatctccaactcctcgtggtcatcttcatgatgaacagcaagcgctacaaagaggtatccaggatgcagtgagagcgattcataagccccaagtgatgcaaggggtttggcggggagatggtccctggtgaagaaatggaaataatcattgattcttaagaactgtcccccacactctttccccatagaggtatgcgtttgatcccacatcccaggagaacccactcttgctctgggcactgtgggacagggcttgcagtggtcatgctgtaccggtctgtgggggatac

SEQ ID NO: 1178 - DNA, 450 bp, Homo sapiens
cttgattctcttttggcttcctccccaggcacagaagatctctgatgatctgatgcagaagatcagtactcagaaccgccgggccctagaccttgtagccgcaaagtgttactattatcacgcccgggtctatgagttcctggacaagctggatgtggtgcgcaggtacaggcagccaagcatctcacttggggtccgtggggtcagagacttggtcagtcacaagcacacagctgtggatctgcagagggcgaagaacctgtagatgtaagcagggaagaggggcagtggttcccatgccctgcgccacgtgaggggtgtgggagagagactggtgctagatgaagaagtgggtcactgctgggctgtaaagaactgtccccaggttcttcccttcaccccacatcaaggtaggactgagggtgggttaggggtggagggacaggctag

SEQ ID NO: 1179 - DNA, 622 bp, Homo sapiens
acagtattcagcaaataaccagaaaagcaatttgtataacttttttaaggaattgagaaagagcgaagagttaaaggcagttcagagagttgtgatttgaaggctttgacatctttctttccttcttgaagcttcttgcatgctcggctccggacagctacgcttcggcatgacgcagacgggcaggccaccctgttgaacctcctgctgcggaattacctacactacagcttgtacgaccaggctgagaagctggtgtccaagtctgtgttcccagagcaggccaacaacaatgagtgggccaggtacctctactacacaggtgagcagaggggcccaacccataaatcagaaggtgtctcaggcctgcctggtgcaaattttccaaggggtggtgcataagaggcccatttggcaccctggcttgtcggtggggagttggatgaccctactctgttgaccaactctcctctcctccactcccagggcgaatcaaagccatccagctggagtactcagaggcccggagaacgatgaccaacgcccttcgcaaggcccctcagcacacagctgtcggcttcaaacagacggtgagccacaactaccatcatccctttgcctc

SEQ ID NO: 1180 - DNA, 373 bp, Homo sapiens
caaaaggttgcttcacatctatttgtgggtgtcaatgaagcagacactacctgcacctctggcagtggatattcagagtgtttctggcagataggtttagaatattcctgattccccagcgctcctgacagtcattccaggcttggacctagattgtgttgatacaaaccccaggtttttatctagtccttcatgttcacatttggaaactgtattgtctgtggccaaggaacccagaaaatctctgcaaggctgagtggctcaagtaaacataaaacttggccacttaagagctgtcagtcagcaagtatttaagcatcaaccttggtattaggcactgtaagggataggaagggaggataataagtgatct

SEQ ID NO: 1181 - DNA, 381 bp, Homo sapiens
cattaaaattgaactggtctttgaaagatgggtaggattttcacaaggagtaaaggcttttcagacacacagggtgcgtgagcaaaatgttagattgcttacaatatgagagacactaaagtttcttttgaaaatcactaaaaatactagtaattaacatatataaaatgtgtcatgtaccatgagagaggctttcaggcatttaaatctcagtggcaggaaggcgtagagagctggaagagaggtctcgggctgttggtgagggagcgcagggagagagagggcgggagtgaaggcatgtttgggagaaggcctgcaaccagccctctgccctctgccctcacacacctttgccgtacccctgtcaccacccagcttaca

SEQ ID NO: 1182 - DNA, 493 bp, Homo sapiens
ggcacagagcgctctgaggagggcggtgctggctcatcctgttcaaagcggaggtcagctagcattcattcctgcagccaccttgtctcttgtaaacttgaatgtctctctccgcccattttcaccctccctgtctttacttaacaccagcttcactacctgtgttttccatcacactccttcctctctcttctagccttggcccatcacctgtttgcttcagtctccgggaagaaaacccccagccctgctgcttcctctctcaggcggccgttcctgtctcccctggctccctccccaacagtgcactggccagccccttccctccagtgttctctctgctccttctcaccacctgggcctcagcagagcactctgagagcttctctgtcgatagtaaaaccctcattctctccttgagtgaccttgtttgctttcccagcttcagcgctcgcctgcatgatgctcttcagcctgtacattactaactccg

SEQ ID NO: 1183 - DNA, 463 bp, Homo sapiens
ctaactctgacccctctcacgagcatcaggcctgcagatccagctccccctcccactccccatgtctctctctacagcgtgtcccaaagagatccctcctggcccccttaccattccttcctcctgctttcccgatccagatcagggccttgggatcatctctgactctcccccatcctccttcccatcacttggtcgtctgttgaattgtctgcacatcttctgtgtttgcctgttccttcatattgccagtgccatggtttgagccactaacattcccagacacttctgcctggtcatcttcctctccagcagcccagcttacattcacttgccttactaagcagagctccagctctgtccttcccttgcctgggaagcttccattgctccccactgctgtagggtatcataacggtcttgtgaggtagacaggctaggtattgttattgttatttggtag

SEQ ID NO: 1184 - DNA, 1891 bp, Homo sapiens
tggcacacaaaatggcaatggcatagtccccagactgcggtcccaactgtctctttcctaacagctccccaggcacccacacttttctgcctctttttcaatctgtacccttgaccctcctcctttttctgctttgtcagactccttaaggcacttcataaattaaccatttccagggatttcccctcacacatgagttattccagtggacagggcagcctcatgggtgcctgtggagggtgaagggtctgcctggccgtaggtgtgatcacacactcccgttgtaacccctgtctcctgtgacacttgctgccccacgatttagctgctttgtgttccgtgcctcctgtttgctggtgaactcctgagttggggggcgtcattccctccactgtagttcttccgcgatgctgactccacccacggtcagcaccactcggaaatacttcacagtcctgtagaggaagacaggtccaggtttccagttacccttctatgtctggatactctgctcattcactgaagccaggccccttcctgcacttatgcctctacccagataatgagttctacccactgatgacctcctctcctctagtaacagtccgcctccctaatgagcatctctggctgacacacgttccgttctccaggcctgtgagccctggtccctcgctgttgctgagccacagcacccgcccttctggcctcactttagagcactgtcatttcagagcagactacgcgcggggtggccaggtgaaatgcagctgacggctctgcgaccaaatgtgaccaaagggccacattcccagcacccggctccaaaggcagagcttggattctatgcccagcacaggttttcagggcttcctcctctctctgggcctaaacagtgatccctttccctgtttcccactacatctggcagaatttaggccacatttcattttcttcttccgcccatggggctccctgcccactgtgttcccctgtcactctgtccaggtgcacaagcttctcatcgtggtggagctgttgctgggggagatccctgaccggctgcagttccgccagccctccctcaagcgctcactcatgccctatttccttctgactcaaggtaaggctggcttccccaccccagagcccactaggcccccttcagtggggcctcttacatgcctgtgcctatttgcatcatccaatctactcctgttctgcctgcagctgtcaggacaggaaacctagccaagttcaaccaggtcctggatcagtttggggagaagtttcaagcagatgggacctacaccctaattatccggctgcggcacaacgtgattaagacaggtgtggatcaggatctgaggggctgttggaggagcagaagccaggccagggcaaacctagtgggtatccttgggcaagtgaagggtctgtgtccactctgcccaccccatcgctccttcctctcccaggtgtacgcatgatcagcctctcctattcccgaatctccttggctgacatcgcccagaagctgcagttggatagccccgaagatgcagagttcattgttgccaaggtggggctggttcaggaaccacagtgaccaggttgtcactttcctgccaatctcaggaggcaggagtgggaggagtttggccaaggaggggaataggtaaagcaatggcatagtcatttcagggcgtgcccgtcatttgcagtgaagccaagaagttgccagagagagcatggatgtgcatgtgagtgtgtgagtgtaggtgtgtgcacatgttgagtttatgatagtgcctgtgagtgtgagaatataaggagggcagaggaatgggatggaacaagatgttctctgacttagaagatgggcgtgctg

SEQ ID NO: 1185 - DNA, 479 bp, Homo sapiens
gctgggtgtgctggtgaactttcctctttgggggcctgcaggccatccgggatggtgtcattgaggccagcatcaaccacgagaagggctatgtccaatccaaggagatgattgacatctattccacccgagagccccagctagccttccaccagcgcatctccttctgcctagatatccacaacatgtctgtcaaggtgagaagcccgtggctgcagagtcacgcctggcagcagcacacccctccctccacactcatggattcctcagagaagactggcttaatttgtggcccacgtcccagccaatctctgtaaaatcactgagctgcagcacagggggcccagaatggggaggggacttggccatagttccatagccagttgccctctcctattgcgtttaagggatgatgtggtcaccagggaggaccaggcagggattcagagggcggggttctacatttggttccaaatttg

SEQ ID NO: 1186 - DNA, 1478 bp, Homo sapiens
ctaaattgtaaaaaagatggcgctggtatctagctccacaaaagggtgagcccttatcctcagttaagcactgagtttggcgctgttactatttgcttgccatgtttttttctggtctcctccgaggaaactaggatattgctgccttgcttaaaatctggctaagccctactccacgtgacatgcaaggccctttgtgacctggtcccttaggtcaagcctcccctcccactcctgccccaccacccagcagccagcccactgggtgcaggccaggcccctcccacatggaatcctccaccgggaaggcctctccccgttgccacatccactgtgttcctccttttcctcctccctgcccagtcaagagagttggtcgtttattcctcttttttcagcatttcccacagggcactgtaataattcctttgatgcctagccccccactagactaactggagaggggcccgccgcttcctgcctggtgtctagctcacagaggggacgcagggagtgcaggttgcgtgagtgcctcacctgcttccttccctcgctcatctcctctctttgctgtgccccaggccatgaggtttcctcccaaatcgtacaacaaggacttggagtctgcagaggtaagctctctgctttctgggtgagaccgaaaggtcaaacttccacacagaaggggagtcgggcgagtgtctggaagggctgagctgctctgaagctttggcctcacttgcctctctccccaggaacggcgtgagcgagaacagcaggacttggagtttgccaaggagatggcagaagatgatgatgacagcttcccttgagctggggggctggggaggggtagggggaatggggacaggctctttcccccttgggggtcccctgcccagggcactgtccccattttcccacacacagctcatatgctgcattcgtgcagggggtgggggtgctgggagccagccaccctgacctcccccagggctcctccccagccggtgacttactgtacagcaggcaggagggtgggcaggcaacctccccgggcagggtcctggccagcagtgtgggagcaggaggggaaggatagttctgtgtactcctttagggagtgggggactagaactgggatgtcttggcttgtatgttttttgaagcttcgattatgatttttaaacaataaaaagttctccacagtgctttgtgcatcagttactatacttcactgcagtattggcaggctcagattttgggttttttggccttagagtactagccccaggtgtgtaatctgagggcgatgggtctgcagatggggaggtgcccaggggaggatgaagggaccctgacctggggtcgggggcctaggtttactctcttttcgtacttgtgtggctttggtaaggtcttgttaggaaaggtgtaccatgtgtccatcaccagctgcagaccttcatctcccaata

SEQ ID NO: 1187 - DNA, 500 bp, Homo sapiens
tattcataatttccattaaatacaggttttggcctggccttgctctggctcctgatcatactccagccctggtcacaatatttggcatcactaccttcctttaatcttcagctgcctttcggtaaaatgaaactcctaaagttgactttgcaaaacaacacttctcctgtgtttcccaaacccgcccttcaatctctgtggcagatgttttgatcctagcgtccggattcttcatctatttttagggctccaatccttgccccattttaacctttgattttgcaaaccaatcccaaaaccttctcatagatctttgattcccttccaggaagggtgtggtgggaggactacggttaagcacctcctccgtgtccttttaggatgtgaggacaggttcaggtgggttaaatgagtcctgcagttgaacccaggctgacctgataccaagttcaatgcgccttctctcaggctgtgctgccttcttccggcctcagcttgga

SEQ ID NO: 1188 - DNA, 439 bp, Homo sapiens
tctggggttctgttatccagtcagtcttcatttgtctttgggtctccatgtagcagtccttctggcccttgacagctttccatgacttcaaaagccaacttttcttgagtgtgtgatccgaagacatacatatggcaggcacagctgcctgaagccctttccagcctgttcaatgtttgtagctgtaatgagcattcttcctgaggagcccagcctcacaagaggttataaatcttcagccttggttgtaagtgaccggagagagtttatcaccctcttccagagagctgaggtcattcgccatgattccctggttcttgcccacataaggtctatgggccatttttccgtctgctcactgtctagaggcttcttcatccactgtctggatgaaccttgttggcgtggcttctaatttcctgaagaaactcagtgtcac

SEQ ID NO: 1189 - DNA, 1728 bp, Homo sapiens
gagaagatggggcagtttcccctctctcaccccagcccgtgtccacttcaaggtgaatgaccagggaagtcacgtgtcccaatcccgcagttccaaagcccttggggaccctactgtcagggtcgtgcacgaggaggtgaaggtcaggtgagccaatcgcctcgaagggtcttgcctcattcgggacagacatccggtttcctctggctctaccgggattctaggggctttagccgaatgagtcatggggggcgggggggtttctgggggagttcccagctaatcaacttgggacaggacagcctggaactttcgatggtgcctatccaagtgtggggtgggcacagcagccaagacccaatgtccttatctcaggtaggggctcaggaggtctcccagacaggcagcctccggagagtttgggggtaggaatgggagcaaccagcttctttttttctctcttagaatttgggggcttgggggacaggcttgagaatcccaaaggagaggggcaaaggacactgcccccgcaagtctgccagagcagagagggagaccccgactcagctgccacttccccacaggctgctgccgcttccaggcgtctatcagcggctcagcctttgttcagctgttctgttcaaacactctggggccattcaggcctgggtggggcagcgggaggaagggagtttgaggggggcaaggcgacgtcaaaggaggatcagagattccacaatttcacaaaactttcgcaaacagctttttgttccaacccccctgcattgtcttggacaccaaatttgcataaatcctgggaagttattactaagccttagtcgtggccccaggtaatttcctcccaggcctccatggggttatgtataaaggcccccctagagctgggccccaaaacagcccggagcctgcagcccagccccacccagacccatggctggacctgccacccagagccccatgaagctgatgggtgagtgtcttggcccaggatgggagagccgcctgccctggcatgggagggaggctggtgtgacagaggggctggggatccccgttctgggaatggggattaaaggcacccagtgtccccgagagggcctcaggtggtagggaacagcatgtctcctgagcccgctctgtccccagccctgcagctgctgctgtggcacagtgcactctggacagtgcaggaagccacccccctgggccctgccagctccctgccccagagcttcctgctcaagtgcttagagcaagtgaggaagatccagggcgatggcgcagcgctccaggagaagctggtgagtgaggtgggtgagagggctgtggagggaagcccggtggggagagctaagggggatggaactgcagggccaacatcctctggaagggacgtgggagaatattaggagcagtggagctggggaaggctgggaagggacttggggaggaggaccttggtggggacagtgctcgggagggctggctgggatgggagtggaggcattacattcaggagaaagggcaagggcccctgtgagatcagagagtgggggtgcagggcagagaggaactgaacagcctggcaggacatggagggaggggaaagaccagagagtcggggaggacccgggaaggagcggcgacccggccatggcgagtctcactcagcatccttccatccccagtgtgccacctacaagctgt

SEQ ID NO: 1190 - DNA, 1734 bp, Homo sapiens
cagtgtgccacctacaagctgtgccaccccgaggagctggtgctgctcggacactctctgggcatcccctgggctcccctgagcagctgccccagccaggccctgcagctggtgagtgtcaggaaaggataaggctaatgaggagggggaaggagaggaggaacacccatgggctcccccatgtctccaggttccaagctgggggcctgacgtatctcaggcagcaccccctaactcttccgctctgtctcacaggcaggctgcttgagccaactccatagcggccttttcctctaccaggggctcctgcaggccctggaagggatctcccccgagttgggtcccaccttggacacactgcagctggacgtcgccgactttgccaccaccatctggcagcaggtgagccttgttgggcagggtggccaaggtcgtgctggcattctgggcaccacagccaggcctgtgtatgggccctgtccatgctgtcacccccagcatttcctcatttgtaataacgcccactcagaagggcccaaccactgatcacagctttcccccacagatggaagaactgggaatggcccctgccctgcagcccacccagggtgccatgccggccttcgcctctgctttccagcgccgggcaggaggggtcctggttgcctcccatctgcagagcttcctggaggtgtcgtaccgcgttctacgccaccttgcccagccctgagccaagccctccccatcccatgtatttatctctatttaatatttatgtctatttaagcctcatatttaaagacagggaagagcagaacggagccccaggcctctgtgtccttccctgcatttctgagtttcattctcctgcctgtagcagtgagaaaaagctcctgtcctcccatcccctggactgggaggtagataggtaaataccaagtatttattactatgactgctccccagccctggctctgcaatgggcactgggatgagccgctgtgagcccctggtcctgagggtccccacctgggacccttgagagtatcaggtctcccacgtgggagacaagaaatccctgtttaatatttaaacagcagtgttccccatctgggtccttgcacccctcactctggcctcagccgactgcacagcggcccctgcatccccttggctgtgaggcccctggacaagcagaggtggccagagctgggaggcatggccctggggtcccacgaatttgctggggaatctcgtttttcttcttaagacttttgggacatggtttgactcccgaacatcaccgacgcgtctcctgtttttctgggtggcctcgggacacctgccctgcccccacgagggtcaggactgtgactctttttagggccaggcaggtgcctggacatttgccttgctggacggggactggggatgtgggagggagcagacaggaggaatcatgtcaggcctgtgtgtgaaaggaagctccactgtcaccctccacctcttcaccccccactcaccagtgtcccctccactgtcacattgtaactgaacttcaggataataaagtgtttgcctccagtcacgtccttcctccttcttgagtccagctggtgcctggccaggggctggggaggtggctgaagggtgggagaggccagagggaggtcggggaggaggtctggggaggaggtccagggaggaggaggaaagttctcaagttcgtctgac

SEQ ID NO: 1191 - DNA, 971 bp, Homo sapiens
gagcatctgcaccaggcttgtcatttaccatcttccataaacttgagcccatccatcaagttgcccacaaagtggaagccaagttcaaggtgaccactggggtcagagcttctctcctcagactcggtctctgcactcgccccagctggtcacttcctgcttgtggcagccttgggctgaagagcgctaagctcacagcccaggagggtggggagctgtggcaagcagggggggcagcgaccgcaccacaggtgtgaggcctgcctgcagccaaagactcctgtgtggctttggggtacccccaccagtccccagtccactatctgcccaaaccttctcctcctcagctcctcagtccctcccacctcccctgcccgtggctcctcggaaagcagggtcagaagttcccactgccagctcggagtcatccatctaggggctcagagatgtgtgaggcaggcaaggaagggttaaagaaaggtccggcccctcatccccccgcctcccatcccccagtccttttttggaggcaacagatcaaatcccaggctagtcagagtgtgggtggtgttggaccaggttcgggagacagcagagcaggccaccctgccccagcactgtggggccctgagccaaagcctctcccctttcagggtacagctggctttgggggagggggcagcaggccagccaacttggctccaaggaagggaagctgctttcccctggcccttccccagctgagcaagcccacataggaccctgagccctgccgcctctgctcctcttcctcctcctcctcaccacaggagtgagccgttccctggccacagcacaggagtccagggagaggacactatgccctgccccgggtggcaccaataccaacagcacacacagtcacaaagggagccacgaggagctttatttatacatgaacgaaggtagatttccctcacatattacaaaat

SEQ ID NO: 1192 - DNA, 1294 bp, Homo sapiens
tttgcatctagaaagttcctcagaggtaagactactcctgggctggggcgggcgcacacaggggtgaccactgggcttgtggtccaggctgctcactctcctcaggtgccagcagatggagaggaaattttgaaagaagaaaccgggagacatcctggaggtcaggagtcaggagcggggaactggaagccgctagaggctcttgcaccatgtggagcggatgtgaggcacgatgcctcatctttcctcactgcttcccttggaggcgcctggggctgcgccagtccccagcccccactgcggccatgccaagcccctcagagtgcagcaatggctttagcagccacctggcggcccaggggcaggctgaggtccgtgatggccagaaccaccttggggctggacatggctgacaccttcaccagttccgacacctgccacggacagacagatgctgcttgcgggacggctggtggtgggtgtgctgtcccagggggaaggaggcccctccctgctctaagggctgccccgaggccccagcaccagcaggagagccgggaaggtggtactcacggtggtgaagggcatgaactgcaggacgctgccacggccaccctgctccaggcagtccacacactcctccatgaaccactgcacgaactgggtgtgggggccagcggtgcgagaccccaggatggaggagatgagcaggaacaggttggctgtagagagtggggggagagtgacaggagggagttccatgagagtgggtgaggtcacactctgggagaaggtgggactgaaaagggaaaagaaacacatgctgagcatgtccccaaaatggggtgtcagagagagaaaatataaaaggcaattggggaggggaggagggggaactagacaggagcctgggggccaggacagccaacaatgaggggcatggagagggaagggaggggcaccgcaaggccccttccagctgacaaggtctcccagcctccatgagaagagagactcgtccagcttagccccaggttcggcagcaggggtggggaactcacccaggactcggttcagagggtcccgcatgttgaccgtgtggagctgagaggctgagagggagctgctcatggatcggtctgctgtgggacggagcagatggagcgctgggaaacagcctgccgagtgcaaaagtggtgctccccggggatgccccaacccgaccttcacccatcggaggtaactggtacatggagagcccagagaagaccctgagatcaagagcacaaaggga

SEQ ID NO: 1193 - DNA, 1331 bp, Homo sapiens
ctttcttctgatcaagtgtatagttggtcccctagttcctaaaaggcttcagagaaaagttcaggctcaggagaaatctctggaaacaggaaaaatgccacagaaggaacccttggcagtaagcctggcagggaggaggggacagtgaaaaggatgacctccagggaagtggttggtggggggtgtgctctttaggcaggaaggtggggagtagccccatgccccagcccgggcctctccgggcatgttttgggggaaggaaggaaggaaggtcagagctggtgagtcaatggcacaggctgtgcctgaggcagtgaactcactcacttgggtagcttgtcatcccctcaaccctggggtaagggaggggcaggagggctgtgggggaacaactgtgggctgggctggacctgggcagaggagcttcaaccctcagggagtgagaacagcaacctcttctccaggggcaggacacagagcacccccttgggggctagaacagcaggtccctgccacaccctctctgaccagctgcaaagatgcctgcagctggggcagcggcagagtggcagcatcggggagtgaattcccaggaaaaggagcggcgcgcggccagcccacacactcactggggctcgaaaggatgttggcatcgtcctcattagagctcagcagtcgcatcaacttcgaaggctgcacatcgtccagggggaagaggctgatataatcctagagggagtgaaagtcactgttatacacccctaaaccccccagtttccagctgtcagggaaaagagcttgagctccgatttgagcgaggtcagcatggctagcagggcctcagcccctctctgctcaacccctcccacaatctgacaggccccttgtgcccatgggcaagctggggccacacaaatcacccatgcagattcctgaccaatcatgcccaggcacagctgccccaagggcaggggccacaactgcttccctttgcctggggaatccttaggaaatgctgtaacaaaccggtgaacaagtgaagccggcgagggcagctggggggcctacctcaatgtcttcgcggtgtctcttcttctggcgggtggacgcctgtcccttgtgggaggagtaggaactgagggcacaccacacggccagcctggcaaagggttccagaaaaagggggacagtgagaggtgccccaggagctttctgtgtctgactgggctccccaaagcccagtctcccagggtggcaccaggcgaggggtgcttgaccctgggtggccggagcagggcaagctctgaagagaatcttacttggcaagagca

SEQ ID NO: 1194 - DNA, 1277 bp, Homo sapiens
gctctgaagagaatcttacttggcaagagcagtgcccggggggtccatgaggctgtgccacttggaggagtcagtgagcaggccaggtaggatgtggcccagcaggaccagggtcacttgctgcatgtccaggcagaagatggagtagagcagctccactgcccgcagcgtgtgctccttccgcgtctccttcagcagctcctagtgcgcaggaaagggggcagttcaggagccaggggcccgggatctggggctcctacaccctgccaccccagcatggctgtccagtaaggcccgcagagggggccccagatgttgctccgcccctcaggctgaatcccagtctctggccagagctccccaaggaggcaactctgaggcgaggcattccggggaggccacctggctcacggcagcctctcagggaagcctggcagaccaggccaggtgtggggagccaggggacaggacccatgtcggcccacagccactccagcccaagtaccttaatcaggttgttgcagaaccagtagacgccgcccatgtgcagcagggtgtcaaagatgtggatggagcggctgtccacccagcccttctccagcaccttggcaaaaatgtccgtcagcacctctttgatgggccgcttggggggcagcaggttccagtagggcattgtgtccaccccggtggagggaaacttgatctgcgtggctgtctgctgcagcacgtcggcacacatgcgctccaggatcgagttcatgatcaccaccctgggggagggccgagagaacctgaggctcaggtgccactgtagggtggggagggagaggagggaacacccatgccagactttcccttggacttaggttacggaaatctccctgaggcattaacccagttttgcgctgggggacggtataccccggggtgacctggcccctgctctgctcctggcaggtctctcacctgcaggacacaaagcctataaatagggactggggagggactttcctccccctggccattccagccagatattcacattttcttttattctccaacttcccccatcccccaggcctgggccctgccaacctgccacataaataaacacaatcacttccccctaggctgagtgcttgggggtccccgcccagccctggcctcctcccaaagtaaactgttccttccaggagaggcccaagggctgccccacaggactcttcccggcccctggtagctgggcagatagaagtgtatatccaggaattttctca

SEQ ID NO: 1195 - DNA, 1203 bp, Homo sapiens
gcaaacaacttattggttgggtgaatgaactcaacgtaactggtcaccagggaagtcctccaagcccctgaagagccagggcaggaaactgtcctaagaggtaactgagggtggggcatggcctgtaaaatctacagacaggttcctagctcctagacagtcacacagctttgttcttttgggagctagttgtctagaacttgagtctctgcgggcagaccctgtttagggtctgcatttctgacaacacagcaggtgctggcatataaacgcttctgccacagagacacagtacatgtttgctgagtcagatgagtgaatgcatgaataggaaagtgagtgagtgatcaagtagcgtgtttgcgaaggtcagaaaagagaggggtgcttgttattggatgtgctgacttctcacaacacacttgaagggtctgagaagggaaggcaggttaccgacctctcattgtagaactgcagggtgttctcactaaacagtggccctgccagctggcggatcatctgcagcgacttctcacgctcatccagccccagcatccggacgtgggccacaagccaagccacagcacacaccgccagactgcataccttccctttgatgttatcagtgattttctaggggagacggaaaggtgatgggctaccatctatctccctttcttgagccaacatcaccttctcagcctctgcgggcagctaagtgcagcgggtggagtcccgggccacattccacacctctctccacaagtttgatcttcccagagctacctgggccagagggagtagctaagacaacgattacacaaaatatcaatatcaaaacatgagctcctggattaaaggtcttcttgcccttacgaaatataacaagtcatcactggctggctctgtgtctcaggggagcaaacgctgctgggaaggcggggctacctggatggactcgaaggccaggaccccattctcccaggcattgaggatttccaagatggcggctgagatgctgagacaggcctcatgccacttcatctgcctgcgggtgtgcagagaagtcagcacaggggagcaaggaacgggctcagggagcgggtcttgaccctgcccccaccgccacccttggagtgggcgcccgggccactgacactagcttcatctccgaggagttgttgagcagggccaccagggact

SEQ ID NO: 1196 - DNA, 1219 bp, Homo sapiens
cagggccaccagggactccactttggtggagtcggggcggaagcaggggtggtcagggttcaggatcttgccctcctcaggcatgcaggtctgcatccaggtctcgaagaagggcacctcagctcctgtgcgcgactcggacagaatcacctgggaaaggggaaggggggcaccagccgagtggggagggcgcggcgcctgccagcgctggacctggggctgcactgtttcccgccaggctgctgctccagcccagcccaaagactggggacgaactggtctaagggagccagacgggggcaatgctgccacctagtggtcaatgtgaacatagggctgaaggtgcctctacggactccagcccgggtgggcacctggtttctgaggcccacagaactaactggctgagaggctgcgggggcgcaggcagtgaggtggggagagttccgggttacctccttcccttgagcccccgtcccggtcgctcccctctctcacctctgaaccataggtctgggccacatggcacagcatgaggaaggagatgtcaaacagcagggcccggacggaggccggtttggctgtggaaggacgggaaggctgagctcccagacgagggcaggggggagcccgtgtctgggttgacagggatcgggatttgcctctaggaaggtcagggaccaagtggctccttcaaagctctgaggctcagaatccttttcttgagtctcaactggaacatcatcccttccttgagaccaaagacccccagcaccctctcctggcatacctaaccaagtcgtaaagggatgagggggggaaggagacacagggatggtctgggaagaatccttttccagcattatccactttcaagctctgtggaagcttccattggtcatggctctgaggagggagcacagcctccccctgttgagctggggagccctcctccctcccacactctcccgccacacccctcctcagggcccactgggcctgcggatgcacagggctgacttactgctttcttcgctgccataggttgtgaattcattcaaactgaaaggaatggagacaggctgcattgaccagggcatgagctgagcagtagctgggcgctggggctacacatgttcagagagcgatagctagagtctgagttactggttaaacttaaaatgagacacattgctatagaaaaaaggtttttgtggtt

SEQ ID NO: 1197 - DNA, 793 bp, Homo sapiens
agaaggatttttattgttagaagatttccaaggcctagagaatggctcactgaatggaaccatgttctatatatgtcaaattccagggcaatcaaaaaaggcaacagaatttgagagccccttattaataactgggcatacttggaattcctccatgcccaatgttcaacacctcaacccttaccctcatctctttaccaaacatgtccactccatcctcagctgaagagaaaggaacacttaggtcgtgagaacaggcccttcctccaagatctccagccaggatgctctgcctaggcccgtgggtctctggatgagacccagacccaggcacctgactcctaccctgctacctcctcccaacgcgcagcctccctgcacgccctggggtcaggggcttggccttcctcacttgatgaatttccgggcgaaggatttcagctttccagtggcggcggcggcagccagcagcaagtccagactcttcccggacagcatgtggcccaggactcccagcagtccctccggtgacttagagtggtctgcatccatcgtctggggacaggacaggaaatcaagtcctgaagaacactgaagaccccccacccaagatacagcctagccacattttctctcttcacaacctggaatgtaatctacatctttctgacttcaatctggaaaatcattcctaaaacccacccctgctctccgatccatccctctcatctacactggcatgcaggtggtaaggttggagtgggcaaggtcacggctaggatcttctctgtcc

SEQ ID NO: 1198 - DNA, 547 bp, Homo sapiens
acgtctctgttgtttccatgtgagatggcctaagtgaaagcgcctactgcagtgcctggtgtacaaatgaagctcccacgggttagcattcagtggtagctgcccttgcctcccctttcactacctccaaagcaactatgtataaaagctaaaggagacagaggtctgtggcctctgtttatttatctgcaagcagatggagcactggaaagaagaaagagaagactgtggtggccagggaagggcacactcaccttgaggatgtttgtgacagtgggctccgcccggaggatcagctggatgttgggctggatgttggcattctctcccgatttctgctggggtgcgtgctctcggtccgctttgctgtggacatcaccagttggccaaggaagggaagaggaatgaagagaaattcttgacacgttccctcgttcaagcccggaaggaaatgcgcagaggaggtgggaagcatgtaagaacctccgaggttggggtgaagtttatggaagcatagtcaatgttgcaatcactgatttagcattag

SEQ ID NO: 1199 - DNA, 863 bp, Homo sapiens
cagcctaggatttttacttttatcacaaagatgggtatgagttaaagagcagtgactaagagtgtaaaactctggtctgaagacatctgtgctttcttttccttcctgttccctgtacccccaggcacggtcccagtcacttgcagcccaaactttcgacaggaggttgaaaggcacgcagcagccccaccgtaacaagagagaggtcaaggggctcttggggtagcacaggtgcgttcacacttaccgcttagccataaggttgttgacgctggcctcagacagaagcccctgcttgccacattcttggagcaggaagtttgtacagtcacagctgtgagggagaaagatgctgagggaactgggcacctggataggatggtgaggggtgggagtggcaggtccctgagcagcatcctccctctttcaggatgaggaaaatctggagtgcctgagggacggtagaggggctctggggacttggcaactgtgggctcctatttcctgcccctgccaaggggagtgaacaaggagacagagtcccctgaggcttctctggcacagagatcaggggaagagcccagaacgccttccagtagggcgggggtgaccaggggagctcatacttgcagcgctggtcagctttgtccaacaagggggtgagcttcagcaggaactcaaaagcacagttgacatcctcagtgaagtcctagaaagaggcagaagtgtccatctggtttccagggccaccaggccctgatcatctcaggcaaccttgtctgctggaggcatcggcctgagttgcctggctgctttctgcctggagcctgggtgtatgttgtgggtgcacgcagacgctgaag

SEQ ID NO: 1200 - DNA, 1495 bp, Homo sapiens
tgctgaagcatgcacattgtgaagcacgtgcacgctgaggtgtacactcacatccggctctcttccaggcatgagaacactgcccagctggggcctgaaggaccctcccctttgcccttatttctgctcccatgcctccatctcaatccccaactcaccttgtctccatgagagtacttcttcaacttcaccaaaacctgtggaatctagggggtgaggcagggggaaaaacaggaagatccatttcttttctctttcatctacccctgaaggcatccccccgaacccctgctccaggaagagagacaggaacactcctaccctgggagtgagagcacacttagtgctaaatgagaaagccaataggtgcccaggcccctgatgcccccaggcctaggcacaggacacaagcaccctgcacctccgctagctcaacagaaaaagatgccataagcaaaagtggatccccagcttcaaggaggactggggcccctttccctggctccctttactgccctgcacctatctgtctgatgaccaagctaaactgcacctctgtggtaagaaacaacggagtctgccaaatgggctaaatatagccctggcactttcagagaaaatgatcaatgggaacttgcactggaatacctggcaggctgggcccagtgcccgcagggaggaacacagggcaaaggtccagggtgccactggtcttgctaagaaccattcctagactggctctgcccctcccacgtccccagtaccttgaggaaagtgaaagctgtccacttgagctcctccgtaccctcgggagactcaatgagccccacgaagcaagctttccagatctccaggacaaaaagtggggtggggatatgctgtgggaagagccaaggatgaggcctaagagggtgcccataccccgtcacccttctgtggactctgaggatttggctgggtcagagactgcatggcagagtcactgctcagctatgtgctgagaaccaggggagtaaggtccaatgacagaagtgtgcacgactggcacccactttccatcatggagcaggagaaaccccacttctcccagggagaaccagaagaatcctccctcctgcccccaacaggctggcctgccttggagaagggagagccactcggcccctcccacctgcatgcgcttcaccatcgtcagctgctccaccagggactgcgtctcgcctgtcaggttcatggtgccctcgagcaggatcacggcgtggacagtggggaagccggtcttgtgcatctgctccgcatgcacagacagcatcgtggggatgctgaggggtcacaaacacaggggacggtgtttggggggccaaaggtgaaggcggagaggatggcacgggtgccacatcttcctaccccagggcgtgtcctccctctcccttctccaccatcccccagggagccggtacctcctaatgagggtgccacactgctcggcctgact

SEQ ID NO: 1201 - DNA, 1435 bp, Homo sapiens
cacactgctcggcctgactccggagctgcgggttgctgagattggccaggatctctccaagtttcaagagagaatgctcgatggcagtccaagaagctggcagagggaaggaagtacagaaacatgatgggaaacaggagagaaggagcacctggccctgaactcctcgattttggcactccctccggcacacgaaaccacacaggaaggcttcccctgaggacaacagggagggaggggcctgagggcagcatgcactgtttccagaaggggggtgggcacctagagctggaaaccccagagaccattcccaaaagcctgatttccaggggacacagccagctgacttcagaaggtatggcatcacacaggctcaggagagagaggcagagggaggccagaatccagtggctggaacagggagggcggccacaaatcactcgaggagtgagcggatcccaaagtccagtcttgcagaggctgtcactctcctctgggggaactgggtccctaaatggctttctcattctcaaccactccctcatctaggcattgcgtttgctgccctcccctgctgaaggcctcttacacactctctctcaaactcccaccatgctctaagcttctgttcaagccccagttcctttagcaactcacccgactggtctaactcactgttctctccttaatgcccacactcatggtctaagccatattggttagcactgaactataagttacttatcctagttacaattccagagggtcaaatgatgaataatggcaccaactagcccattaacctccatggagcataaaagggggaaaaaaagacaagacctgagatccattaaaattcagtattcatccgattttcagccaataaacatttatcaagggcccaaggtagggaagaggctgtcaacacagtccatttttatataaagattgtctttttggacttttcacaggcagtaaaacatacttggggaagaaataaatatactagtcctaaaacaagctctccaaccaggtcctgaagcctcgagagtagcccattctagcattcttgttcctggagaacaagagacctgtaggtggtcccaagccacttgggcttcaaggagcaagactatggccttaggaccccattgctggaaatactggcatcttccctcccgccaggtgatctgtctgttctcaggctctggaaagtacccaaacttaacatctgaacttgagtcaagaggcatatggtacaacaggcccaacagcagacaggcactgtgttaaaaggggcattttaggtaacattcaaatacaagagtcatctgcttccaagcgatgagtaacatggagacaaacacaataatggacactgtgcttgtcttgtcctctagttttttcctcgtctgtgatgtactagtcttgctac

SEQ ID NO: 1202 - DNA, 1479 bp, Homo sapiens
gctcgggtgccaccctgcccaagtccctgggatgtgtgcaatgcttatggggagaaaaaaaaggaagtgggatggtttcagatcctcctggaaagaggtgggatggcatcctgcctctcccttctcaattaaaggaccggctatgggagcagcggcaggtggggctcaggggaatcaagggacatacaggcctcctctagtttggcgatgtgcagcagggcccggttcttggtgctgctgagggttttctccaggcgctgaaggcacatggcaagctgcttctccccagcggctggagtgccggcctccagcccctcccgcagccgctctgcagaggctgccgtgcagcgcagcagccagtggagggcgctaagaagggctcggcacagtccgatgcattcctctgctttgccgtgacagctacagggaaggatgcaaaatcagactctgttcttccaatggctgaaatccgacccacatcaatgttccccagagtccctggcactcccctactagggactagggctgagaagctagcaaagtcctggggaagatgcttagcccctttggctcctactggacaagatttcaaatgagctactccagacagagaggaggcactctgtcctaagggagtaagaaaaggagggcacaggtaagtgtagatgggcaggtggggagaaaaaacgttggaacccggagttggtctcggtctgtgtgctaggagctgcacctctgcacaaagacaaggctggaacattgtattgtgagcccccttacccctgcccttacctcagacggtcacaaaacatgtccatgatgtccagcaatgcctggacacacaggtcccgagaaaagtcatcaaactgtggaaaggacagtggagatgctacggaatgcctccatccacccccaggtctcacatgaggcagacggtgcattcaggactcctgctcctctctcctccaaccctgggttccagactcagcatcctcaacactggacattggctcccaagcaccagcccctacttgccaggatccccctcccatggaagtccagcaatgccagccagaggcatcatgtgctgcctatccagcctcacgggtcacagcatcagggccgtcaaggaggcggggccttgtctgtcatccccaatctagctcctgagtgtctatggtcataccttactgatggctgtgaggacagaagagtaggacaccatctggagagaaggaagaaagataatctttagacaactagtctcccacagttgagaggaacaaacactgatgcttcaagttgctgcagctctcctgaacctcaaccccttccacaggccctcttcaacccaagcaaggagaggcagtgtcactgtgcactgccctgttcctgcctctgtcagacttactgcaaatggtatcagcataagcccatcaagaagatgattctggggatgctcaaaggctccatgtttca

SEQ ID NO: 1203 - DNA, 913 bp, Homo sapiens
gccgtctgctcaatcacctgggtttggcaaactttccatccatgtgcaatttccctctcaccaaaatacactgctctgttcagccatctttcactagtactcctgggtgaacaggagcaaaacacagagggcttaaataccatcagtgttcagaaccaccatactgtgaggccagggctagtgtctgatatccatcagaaagctgggagcctgcctgggcaggatgaccataacgttccggcgagcgttttgtttatttataactgatgtccccatagcgagtgcttggcaaagaagtgaaccttgctggataccaacctgcagggggagctggatgtccccactgaacactgaccctcaaatgccgggagagaaacccccaattatgcatgttccgagggatgccattcgtcaaaatgaatttatggtcttcaaattctgaattctgttcagcagatttctgctaactgtatcaataaagcacggctacttcagagacccaaaaatgctttctacatgacgaactgttttacacagcaggatctggcctattcaagtcttaatcattctatcacagtagaagctctaaaccaccacaggcccccagggcaggagaccctctgtgtggccaccatgcttgtggctagccccacctgaccctgcagctgctctcaaatcctctctgctcttctgaatattcaacaccccaactactcctaagtgccctctactcgcataacattgggccaaagagcctcttgactctgaaggaagaataaattactaattttgcacagcacttgagagggcacaaaggtctttcatatctatttacttctgttacttcagcctctttctctttcttccctttcccatcagtgtttatacatctcaagactcttctattggtctg

SEQ ID NO: 1204 - DNA, 623 bp, Homo sapiens
gggcccaaatgcactccaagttttttacccccagaactctcacttcttggtgggggtttgcgggaagcttacctgggaactaatggcatacttcaggtaggacaagatgagaggattgggggatggtccaatcatggcctgctctagtaacgcatctgcaagaggaatagcaaaacacaactgagtgattacaacttctctgggtttatccctcccatctttctttcccagttcacttgagacctgccaggttgagaatatcccaggtggctcctttaggaaagaatttcttcatgttgattgcccattggtagtcactccagcgctccttccaggcttgcaaaatggcttgcttcaggttgaccaccttcattatttcactctgagcaggtggcagcggtggcggccagctttgaggtgaaagaaatggagctaaagaaaaggacatgaggttctaaggagaaccggggaaggcagaattaaatagaaaggagaagatgcgggaagatttaagcgagacagaggaatttgaaagaaaaagagctaaagggataaagtaagatcctgtcagactctctcctcctgaaccgcccttccttaaactggggcactaagaaagtatc

SEQ ID NO: 1205 - DNA, 834 bp, Homo sapiens
gtatcaaagggactaatagattaaacagggcatcaaggagttaaggcagtcctggttgcctaattacgcccttagctctaaaagcgtcccttggccaccaccattccaagtccagatttgctccctcatttcctccaccttctccagccctgtaactatacctcccaatttccttttcatccaccacctccccaaatttaagcctaccgcacaatccagttctaggtggtaggcatcgccattttggcacttgtcaagaagctcactttctattggctgggagtaacaaacgccaaccaatagaaatgcagcaaggaacgccccgctgtcttctgggaatggtagttccttggactgaaaccgtatttgtctgcgccggcgaggaaactaagggactcgtctagtcggcccgcattgttcttctcctttaagggaggacatccaggagctgaggcactacagagactcagggactcgagggagctcgaaaggccgctcacaacccggcgtcgcccacgacgtcactgtcgaccgggcttctccatcatattccgacaccctttcattcgttagcccctagttagtaggtgcggcaagggtgtggcgtgggggcaagggtgtggcgttcagcaataaggtctttctcctttcctgggctctttctgttctcctaagcccctggagctaccagagctattctcatttccacaactatattctaaaagcgacaccgaggtgccttagttgcacacatatcaccgtccccgaatcttacagtcctatcagaatctccaggccctccatacagcttggatacaagggaaagtaaagagg

SEQ ID NO: 1206 - DNA, 991 bp, Homo sapiens
tgttccaaaggggagagtgtggctgaaggagggtcagatcatgtcctcctgcggttggtactgcctatggcctttcttcctccccatacattcaatccacacccctctcttaggctccctttgtgcctgcccaagtgacaccattggggaatagtgtgtatacaaaacagctgccaaatatatgttgccaaagcttctaaagcaggaaggagggaaatacggattcctcacctcaccttccagatgacccccggccactccactcatacttgagactgccacaaaccctgcttctcctcagtctctcacatatctgacttcccctgttctcccaggcccctcactctacctttgcctgctcccctgctgtcattctgtgcctgtagccacagcctaaggccctccacctggagccattcctggatcatcctggagcccctgtcgcatacctcagagcccaaactgcctctcttggagagaagctgtcaactgtgtgtccggtccacacaggactggggactatttgggccctgaggatggtgatattttgagctcaaaccattccctctggcagggagcctggcagatttctagggaggtgcctcctccccacttcgcagtgacagggaggcggcttttgtagtcaggccatctgccttctctgtctccccacctcccaccagcagccctttctctaggcttggcaaggtttccccaaaggctggactcctatgtacaaaggctcccttagctctgggcaaggaccatttttagtttatccactttgacctccctgcctctctagtctgtaaacatcagaggcagcctttcctatatcacctcttccttccacaccacaatatcttcctagggacccccttgggctctctggctcactgcaagcacaggaccgggaccccatgataatcctccaaagggtgaagagagatgctaacatttcctttgggtgtacaaaaaaacagccccccaa

SEQ ID NO: 1207 - DNA, 1166 bp, Homo sapiens
gccctccagcccatctcaaagccccgtcctacttaccccactttcttttgctgttcatttcctctcaacagggacaggggccgaactcccatctctgccctcctagtcctgagccccaacctctttcttcatcttgttgcctaccttggctagagagagaagaggggaaggtggaagtcaaccagtcagagtgatatggcaaccctggagaagtgtcagaaaagcagctaggccagagtggggtaagaggtggcaaggaacagggttctgggtacccaaagggaagggaacattccttatctatctaggctagaaaacagtataaagaaaagtggcaagagtccagacccaaaaacccagaaacactgaaatcgttggtaaagcatacaaggcacagagggtgtcagcttcccttctctccatagggaaactgagtcattccttttccctaagtggaacattttcctctggaagcttgcctgggtccccccactatgggcagcaggtggatgggaaaagaaagacagtcactcccaaacacttatacacagctggctccaaaccagtctcctcctcataccagtcaccaaatcaaaatccctgctttctgtctatctgggggagggaatgatgggaaagaggtctgcaaggtggctgcacctcagggactcagggactacccctggatcccccacagttgcctgtctctgtcttcccactgccccaggagagtgaaaggcagaatttgaatcaactcttggaatagcttcccctctaacaccctggaggatgccttccctctccatactcccagcacaaagagaagtgctgtgatcctgaggccgacagtggctgggaagggagggcagcctgccatttcctttgtatggcccctccctccaggccctgagagctgctctgctttatacttttggcttccatatcatactaccctatcccctcctttaactggagtgggagaactgcggaaaggtaagccccaaactctgatggtaaaggagacttccctgctccccctcctctcctctctcctgctggcaaagataggatgagaagactctaagggaaagtgaaaccagaagctgggagcatttggggaatctaatacttggcacatattaaatgcttaaaaaaaaaaagtgtca

SEQ ID NO: 1208 - DNA, 1000 bp, Homo sapiens
ctgctctccaactttctttcctccatttgcaccactctttctgattgggaaacccctaggagggagaaacatctgagctttgagttctcttggctggtagtacctcagtttcctctgctgtctttccagagcacccccaataagttcagctctgtctgcagagtctagaggtatatgctggacatgtcatcacttgctgacctagggtccaagaggtcaagatgagatagaggaagggatttactgaggcccaggccacagagcttgttccatggtggctggtagaggggcctatctcctgtttccccaaactgctagagatgtgtaaggcttttgagcaggggtagaggatgctgtgtggagttttagctgccagactttgaaaaaaacctcttcagaaagatatctggataccttggttcctaggggtcgtatcctcaagaaatcttagggtgcttcctagcaacagtctggaaggaagggagggagagatggagggagagagggaggggcctaggcatggctgttctgatgggagcccagagaacaggctgttcctgctacctccttagcaacggaaatctcagctggaggggccatcagacatatcctcttggagggtctatccagccttattcatgccacccctaccctcctcatagattcggggaatgctctgaagcagaggtggggaatgggaggggacagccctggtggtggtggggggtttcatgacaaggacggaaaaggagctgaggatgaactcaatctgagaagagctagcagcttcaagaaatgggtgggcagggtgagtggggtgggaggacagatgaggcaacacagggacagtggctatacgcccagacacgggctggatcctggcacctggggagaggcctgctttgaaagcagtgtgcccttcactttgccctgcccagacctgtcaccagtccatactgggagcccaagaaaaagagagaggtaaaaagaagatgggggt

SEQ ID NO: 1209 - DNA, 983 bp, Homo sapiens
attttaagaaggagaagatgggactggtaaacccttgtctttgagtgctccactctgcccctcaggaaaaaaaaaaagtggaacaggaggcacttcattttctatggctctgggtttaggatttcagaaagtcgtcaccacccaacattatagggccttgcatcaaagagagatatggtggggaaagccagaatggaagagagacaaaaccgtagcaccttcctcctccccctctggacaccatcactcctgccctgatccagattaccgctggccctccccactgcctcctagttctgcctttgtgatgcagagtataaatgtatctcatgcattgggattccctcccagctccttgagcagcccaatcccaagggactagttccatacagggtagagtacagaccctgagcactacatactgcagccttgctccccagggttccggccaaacctgatcaccgaggaggtggcatcgactggcagacagccaccctcagtgcacctcattccactcactgcactgactctgcacactgcagcctcctgccccacactgcagctgttgcttgtctcctgtgagcccagactgaacacaggttcgcttactgcatggaggctccgtacgctgcagcctcaattccccattacagctgccactgcacaccacaggctcccttcacccatggcatgccctcaacaccaccactgcactctgcacgccataggtttcatcccagctgctcttctcatctccatggttccagggaccccaagagaggtaccctcccctccgccaagcattacgaactccagtaccccctgtgaaagaagtggttccaacagcactgaggatgcaggtggctgagactaagacatgagcaagggcagcccaacttgggtaagctgtggctcagaatcccacactcgccaagtgactctgcccagtataaactgggcgattagccgagcagctcccccta

SEQ ID NO: 1210 - DNA, 592 bp, Homo sapiens
ccctccccaagagcagactatgtagccagggccccaccctgagagccgtgggaaggctgtggcccccgctggtaaaactgggctaatgacagcaggggaaccggcggggccaggggggtgctggggtaattagggctcggcctggcgctaggagatcctgagatgaaaggtgctctggcgtcactgggttggttttatgtccatgaatgcaggtgtgtggtgtgtgtatgtgtgtgctgggggtggggctggcatggtggagacctctcctttgggttgggttagggggtccatttgtatgcagcccaccgtcttccttagattgactctggtaccatttggatttttgtgggagcaaacatggggggaaataccaccacccgggagctaggaattgagggggtatggcagatcttgtcccctccccgagctcaggagagggagcagattgttgggggaaatggctggtgacagagaatagaaagagcctatatggagaagggtgacgttggaaaagggaggcagtggatcggtattgatgttagaaatgagaggggagggaggtaacagggaatgaacccccacaaggatg

SEQ ID NO: 1211 - DNA, 378 bp, Homo sapiens
atggacgcccccagcacggggcgctgagacccccgcgtcgctgcccagcccggtccggcgcgccacgccgaggtaaggaggagggagcgagggggcattaatatgcaaatgccttgcgattgattatgcaaagccgcggggctccgtggccagctcccaggcgggctaggggcgcccagggggtgcctgctgccagcctcagcctttcctggcgccccagtgaccctgtcacgagcccgggagcttgcaactgacgccctggggaagggaggtgttgctaggaggtcgctgggccccggggttcgcaggcggagatggcgtccgagcctccccctggagggcccgcccggcctctgtccggccagtctgctgcgcatt

SEQ ID NO: 1212 - DNA, 1227 bp, Homo sapiens
tttgtttacggtgcgccggaggcctgcccccccagcccccacccctagcctctgaggcccgagtggcctttgcaaagctgcctccagctgcggagggcagtatgagtgcggtggcgcgggtgggcttgcacgggtccggggagagggaagttcccccgcctcacccgcctcccggttgagcatggctgtctggttgcaacactgctaattgcaaaaacgcggttgttgggggggaatgtgtgtgtggaaggggtgtacttggtggtgcctagatgattaggagagttgctggctggggaggagagggagaaatggacctgtgtgtgtgtaccccaccttgtttccctccccttgcaacgtgtctctggtgccccttctccatctggggccctcccttgtccagcgtgaaagaaaggcctggggggatgacaggggcaattgaaagaaccaccgttccaggggtgggggtgggggacacagaaggaaagccagtgaggtgggagcctgcccctcagtgctggctttggctccaggagggggaggggatgaagggggctgttgtccaaaatgaggggggaagcaaaagtgacacgcagacacagagatatgtccacacagacagccacatgcacatccagggacacccaggcagactcaaggacaggagctactggacacacccacatggggacaagggaagagacaggctgctgctgcaccgtggagctctgaggggtgggatatacccatgggagaccaagagcatggggaccgatccatgcacatacccacgcacagggtcacacgtagatgctgtcacacactggggcaaggaggagttgctgtcacccacacataaaaagtcactgtcacatgcatgcatgcacacagagcaattgcacacagcagcacaattacaaaagaccctgtcactcacaggcacacacgtgctcgcatgagcccagtcacacagacatcattgcttgccgtgacagtcgctgtcactcagtcagatgcaaacacagttacacaccaacacatgtatacacaacttagcaacaagtattttcctggactctttactgtggagctctgaggttctgtaggcaacaaaacccttgctcccaagaatattaaatttggctgtatgaaaaagtgttcctgcgtaatggtgtaaagcatgcattcccaatgacatgttcttggtctctatcgcttgagatacca

SEQ ID NO: 1213 - DNA, 640 bp, Homo sapiens
ctgtggaacctgcagacacaggtgcactcatttgcacatggtcccctgaactcaggtgcagaatgagttcacaaggcccaggtccccacagttgcaggtccacaccaacagtcgtgtccacacaaccccagatacacacaactgcagcctgtgcagccgagcacacacttagatgcacacaatcacaaatttttccccttcagcttcctcctcccctttttcctctaggctcagccactgtgcgggaatgggctgttttttttttctttctttcttttagagggacagagaaacaagagcaaagacagtgggttcaggggggttccagagggccgagtcatgggctcaaagcagtgtccagtgacttctagaagctaggattctcttgactgttggggaaggggagagctgctctcctccctaccctaaaagctcaggggtgtctaactgcccctgctctgagtcatttgcctgggtctttcctgggaacagtcagtcacttccagctgagttcctgcgccccaccttgagtctggccctttttcccacctgtaccctcctgtccaaacttggaagctttccttaagaggccatcggctggcgagtgtctgtgtgagtgatatgtacttttgacttggaa

SEQ ID NO: 1214 - DNA, 815 bp, Homo sapiens
agagctggggactggcagcaatgttcttcatacttttccagttgttaatacccaagctccgcccctctgccccccctgcgcagcctctggggtcagcttgaggttggggtggggggcggggggctcagctggctgctcaggacttcctgcacttccttagtgccgcagctgtggccagcaagttttaggggctgggaatgggggaagggggggggggtcagccactgcccatgctgacccctcgggcctgcatgtctggagacaccagttctgtgggcaccctcagggtgcaggctgcagccagctagcagctcttaaacaagccatgaagaggctccccccacactggcccaagctggaaaagaaccgcccccatgggcagtggcgggagctggcaggaccctgctgagttgggtccactgcagggctcacaatggcctttctccacacccctggcagctgaggcccacctcagagatgcccaacagctgtgtcctttttgcccagcctcagggcctggttctgagggcacagctgcctagactaagtatgtactaagcgaggccctcccacccgtgagtgcaggttccagcctagaaggggtacctcttctggagagggaatttgaggagggggaactcaggcaggagacatcgagcccgggggcaccaagcacttctcgctatgctcccctctagccttggactatttggaggtggaggcacttggcagagaacccacagggcagctacagaggggaaagactgaggcttggtctcagggaacacatagctggatgaaagaacaaggcattg

SEQ ID NO: 1215 - DNA, 782 bp, Homo sapiens
tgtatatgtgagcggttgtgatgggtgaaggaagctgtgggcctggggtctcccagatttcttagagaagcttcgtggagaattgggtctcctagacatcagtgagactggggcctggggcagtgggtctccaatttccagccttctcaccgtcatgtaatcttttcctcccagacaaatttttgcagcctggaatgagtgtatgggaaagagcccaaggcaggcccctctgccccaccctcctttgaccctcgcccttcagcttacaaggagcccttggcccctcagcctgggacacaccccaccagctaggggcacctgcataaatctttgggcatcactgcatctctgttcagggtctgagctctgggggtgggagagagagaacaaggaaagccgtcccctctcttatgtgtgggctcaaagaggaggcagtgcccttcctccctcctgggagcccagcattggtcaaccaggacccagctctggctgataggcaccagattcccctgccctccatggagtggtacttagtgtgaaaggtggtggcagagagaaactgaagcactgagtaatgaccagtgtggtgggcacagcactttgagatccagcatctgtcctgggttgcctctttgcctttgtgagtctggtgatcaggatcccctctccaaaccccttttatttagccctgcccctcaaggtgaaggaaggacaatgggaggataccctgtaggggtgacgggaagcctttggagtgggaaccaatctcaactctagttctc

SEQ ID NO: 1216 - DNA, 854 bp, Homo sapiens
ctgggttttcattatctagagacaatggttcctgtctcactcaggttgagggcaaataacacaaggtgggatgacccctgtgttcaatccatgttgcatcctggcatggtgagcaatgcctgtggattctccttttttcccagggcctggcacatgccagggtggggcatacacatgctgcctggaaccagagacagttctcagtctctcactgaagtatctggggctggtgtgtggtgggggcacatgtggttccaccttggtgtcacttggcaggccaaagctggggtcatagggacctccctccggtatgccattgcgtgaggtggtccagagggagggtcagaagtttgctgggtagacaagggaagcaagatgggtgttactggtgcccaggaaatactatccttgcttcgctgttttgggggtgggcattaaaggttgataccaaagcctcagccatgcccctcagcagtggccaagagcagaatgattggaccaagcccctggcccacctcctcctcctcctcttttcctcttctaaagaagagatcggctcttggctcccagagccccagctgcctgtttctttttctcttttaccaggcatgggggtggggaaacaggggaaccgaggctttggtgtctttcggcatttttgtacacatcagtgagtgggtgtgttgtgcacgcatccatgtgagagtgtttttgtgcatgtgtgggctggggagggctctgaatatctcctggaacggtacccagagccctgtggctctgcgcatgcggggtgagtgtgtgtgtctgcacgtgtccgtgtgtgtgccggagactcagctgcattcacgcgcgcg

SEQ ID NO: 1217 - DNA, 1579 bp, Homo sapiens
ctgcctctgccagttctgcttggttaggggctagctccagcctctggggtgcctgggagaacatccctccctttctttccccctccaccattccctcccctcctaggccatgctcttcagggcttgcaggcaacttcttctactgccttagatgagggagtgaggagggaggaccccaagccttgtgcccatggtgccatctgcagcaagtgccttggccccgtgacattcatgcctccagcattcagctgccccagctcccagctccaattacccgctggctgctgggggagggtggggagaatgtgccgtgcccagcttgggggtgctcctgcttctgctttcttggctacttggatctcctgcctccattcctgaggggaattgggcagggggggcgtgaagttctgtgggctgataaggaggggctgagttctccagcatgggtgtgggcatgaccacccaccagtggtcatgggggatggatgtgacctgggaggagacctccagacctgggcacccaccttgatgcctggctggagctggcccgggcaggaggagggagaggagagcagcaggtgggtgaggctatgggggagccgagtgggaagcagtctttgatgttaatactgggcatctggcccaagtcaaggctgctgtttatgtctttctgtctctgacctgcagggggggtttcctgttatattcttttggggcggggtggggaggatcctttgtttaagtaaccaatctcccccttatgaggatccccaccccatctcccattctctagcctctaaggtcccacagtggctaggtgatgagtcactgccccccagctccagaacctgtctcctgggggcccagtgagagctcaccaaggggtgccgcctcccctcctcccgtctcccccatgcctgccaggctggggccctgagtctgtgtgtactcctctgccacatcacacctgccaaatagtaccttccttcccgccttcactcctcctctccttcctggcactaggataacagagagttgggtggggcagccctgctcaatccatacctgagaatagaacagggggtatgggaaaggacagggagtcccggtcctagagaggcctctgcccctcagcatgggggcacatgtcgctgctgcagcactgccaccaccacagactcccaggggcccttggtgtgggtggctgcctgtggtgcccgtgttggcatggggggcagtgctgcccatagacgcctgtgcccatgcatgcccatttatgtgtctgggccacggtggccgccccggcccctcagcatcgcccttcctggctcccatggtgggaggctgggtgatcaggagtgggtggtgggggagggatctccccccaccctagcagcaggcagaggggaaggggagagggaggtgtgaacctacccacagaactattaatagcccacatgccaggccaccaagaaccagctgtcaccgtggaaaccattcctacgcccccctccccccagcctgcatggggtgggacttagacagggtacgaagccccccacccatctttctttgttac

SEQ ID NO: 1218 - DNA, 1459 bp, Homo sapiens
agcctttttacccctcctcccatctttccacccttttctcagccgccccgcatgtacgtgtccctgtggctggcaaggagggctgggctttcttcagagcactaaggacaaagttcaggggccccagaaaggtggggccaaagcccagagcagatacgcaggagggttaatgcgggtagtattgggggttagatcctggggacagaaactcccctctggcagccccaggagtcctttgggggtgtcctcagatatacaggactgcagagtgggacggctcggcagtgggaacctggcggggcgcccgtggatgccgcattggccccgtgtccctgtccccccatggcagaagtacttaagcttaatgaaatgcttccccctccacgggcactttgcctacactgcctcccagcagctcttatctcacaaggagggagtgggtggccaggccagccgacaggtgggtcttgctgtcctgctgtccagcctgggcacagaaccccatagctccgccccctcggcctccttggggcagggcctccctcgcctctgcagaggaggtaccaggaaggagtttggggagttaagctggactctggaggaggggtgagaggctgcccttcagggtgggtacccctgccccatgccccttacccgctgacctttttctgtccgtggctaacacaggctcatgtggtatgtgtctccccacatgctgggccctctgcctcgcctctgtatcaccccaaaggcccaagtgtgtccctggagagatgccaaggagtccccaggggttccagcctctttctgggtacccagtgagggtgccctaggcagcaagggcagcaccttgctcctctgcccactaccaggggctgactgtagctgggctgcactgcccagcaccagggcaccattcagttcaaaagaggggtggggcagagagcgagtctgcccctccccccagtgggcacgtgcaggcccttggcagtacccagacacatttggagttaaggctgggcaggagagagggatggggaaataaacatggtggcttaggttggcactgctccaggtctgcaatgtagcaactggtaagtggcaggggcctgggggaggggaccctcaggagccctggcctggggcaggagctgcccatgccatgtggctgccactggtgttccccgcctggcccggcccacagcagccagtgctcattcctgcacacactggtcctcctcggctgcccccaggacctgctccccggggctgcccctctctcagcatgcccactcctgtgcttgcctcctcccctccctgggggcgcttgggcctccggctggcgagtggatttttccagcttctgtaaacaagtggtggcagtgtgccaggcgggcaggagacaggcgggggcagcaccacagccagggtgtgccaagcaccgaggcacagcctgggg

SEQ ID NO: 1219 - DNA, 723 bp, Homo sapiens
cctcgctggacgtggagtcagaagatcgtcctctattgtccagcccaacccccgtagcggccctcgccccctgcccctcactgtctggctgagagcattaggccccagtgcccagcccctgggcttccccacccactccttctcctccccaacctccaccccttagggctggctacgccattataaatttataacaggaatttctccacaagccaagaaaaacttgacctactttcttgatggctccctgggctaaggctccctgctcatgcccccccaccccagtctcctgtccagcccccagtgcccagtcctggtctggggtgggtatcagaggtagaacgggccacttttctgtgcaatgcccatgctctccacactaccagcttgcctgggtgcagaggccccgttctgctgctggccctgcccaatcccctgacttatctccctctctcttcccaccctggctgcttatcagctcctgggggtggggccagggggcctaggggtgaggtctcctatgcagcagccacgtgacagaggttgaggtcgtatgttggggagctgtaccctttgtccccctcctacccgccacacctgcctgtgtgcacacagacagtaagccacaggtctgcagcccagggtcagaggtgcaatgccgtaggaatggtgggcccggcttggcactgccctggactccaggtagcagaacaaggctagcat

SEQ ID NO: 1220 - DNA, 1366 bp, Homo sapiens
tctcgtgccctctttggagggtacagattctctctccagttaatatgtgttagtttcctttcctttcccccttgccatcctggtcgatagcagctcagctaaaccaactgagaagtctggtcctctgcctgggaagtgggattcgagaccttgcgtgggaagctctggagtccctgaggggccagagttggggatcataacttggctggcagcatgggaggtcagttccctacagctttcaacatctctctctattaaggcacaaagatgggcattcatgctcactgcgtgccgctctatgtcccatccttccttcacagataccctccctgcctatgctgaaaactgcttgtctctggtcccctcttgcccctataatacagatgagtttcaggaaagcttttctagaggggtggtaacaatagctagtgtttaatagttgctcattaagggccaggcatttgtctgaatatgaagactgagacatattacttagtacatgaatgatctcattctctccctccattccttcccatgtctggggcttaggaggtggatctccaatctcgcctgctgtacctgttatctaagggatcatcctggtcccctctctatgcctgcccttcctgccccctgctgtcttgttatgggatcccaaagccccaaatgttgccaccaaagggatcctacccaccttcctaccgtgacaccttcttacccctgcctctctcttctctccacagggatctctggacaggacaagactccgaagctactcccccagcacacagcccgggacccacaaacccagcttgcccccagccctcccacctgccactccctggcccctcccaccgcccgccccccttggggcgcagggcatggtgtgaaaggccaagtgctgaggcgggtatcatgggtgctgtgccctagggcctgggtggcagggggtgggtggcctgtgggtgtgccgggggggccagtgtgcccaccccagtctcttggcgtgctggagggcatcctggatggaattgaagtgaatggaacagaagccaagcaaggtggagtgtgggtcagacccagaggagaacaggtaatgggttcagcaactaggtcatgccaactcctaagcagcaggcatgggcacctggctgagctctcctttaggcaccgcctttaagcacctctgtgggatggacgtgaggccagcaagccttctgcctacctttgtctggcagatgaagtcatgttcagatgtgacaggcacttggattgagagatgctcattttgaagcggggagcgatacagagcaattacagggagcacataaggggctcttccctagacattgctgggcagtctcag

SEQ ID NO: 1221 - DNA, 1343 bp, Homo sapiens
ctagacattgctgggcagtctcagatgcccccaacgtcccttccaccattgctgcccttaccttgagcatgtgggatccaaacagccttgccattttcttcctctccctaccagcccatttactatctgaccacaagtgtgttgtccacaagctgcggttcacgtaatacatttcagggcacatgcaccagtaactattggtcatagcccaagcttatattcggaatctattgggagccccacaagctcttccttgttcatggtcaagggcgggcactgcgatggggctcctcccagaaagtgcacgccaaccatgatggttttgcttccacatgggtgaggtgtcagccctgcacatacaccaagggatggttacctgtgatctgcattgcccttgaggagcccagagggtctctgtcttttctatcagctccaagtggcacagagctttgtcccagttggcacggtgccctgggagctgggtacagcctgtgcctatggccagggagagggtgggggtgggggtgctccggggagcagtgtggctgactgttgcctaggagatcagatcccgagccaggaagccagaggcctggccaggcaaagccctaaggcccacaactgggtccctggagggtagaggaagtagatggaactcacagctgggcagggcatggggtagctcccctcccccaaagcctcaccccaggaaggactctgaggacgatctggcctgtcgctgtgtggctgtcacttgcagcccctgtgtctcccagcttaggcttctgtgggtctggaagagtctgtgcttaatgtttggagaaaggcaggaatgccagttcccagtctcctaagactgcaacccctcccccatcaccttcccctcccccatgtctatgcgccaccttgtggctatctctaggactacactcagaggctgtgagtctggtggtaactgctgaagccgctagctcaactggggcctaggtgggctgagttcccctgcacccaaccctctgggaggcgtgagggagacctgacctttcagcctcataggaagtagaccggagtaatccccacggggcgtggagcatagggttgtctgtgactgtgaccctggccaaggtcactgtgtcagtgtgttgggagctgcatccggctccaggaggaaggggcctgcaacatgccacacgcagggtgggtgcgggaggttatacaatccttgcatgcatgtagagggcttatgtaacctgtgtgcaccgaggttatgcaacatgtatgtggagagcctggcaacatatatgtgcagtggctgagggttgctaataatacgctgcacagag

SEQ ID NO: 1222 - DNA, 1481 bp, Homo sapiens
ctgtgcagagggtgtagtgttttctattgctgtgggttatttagcatgtgtgtatgacctggagctcaagcaacacgtgcacactggagggatgagggtggttttatgaggtgcctgtgcagagtgttgtgtaacacatgggcatatcctagaggttgtatagcacatttaagaatgccctgaaaatttcacaggtatgttggccctggtgcatactcaccatccatgggtttatagtgaaggttgcatggttattcatctgtgccggtgttatgttgcatatgtatgtgtgtgttctaaaggctacatagctttaagcatatcctgagaattcttccagcgtattcgtcatgtactgaaagatgaggatgtcctgcagattatgggtgcttcaggtcttctggcgggtgaatgtgtgtgtgttggggctctagaatatgcttgtgccacagccaagccccttatctctctcccctgcaacttccagataactggacccttttaagcattgtcagctgaccctggggggtgggaggtagaatgaggacacaaaatggaaagaatcaggccttgggggattgcataagcctctcggatgagaaaggggctactcgaagactgctctgtgattctgcccactttgcctccatccagtgccaggtcaccagatggaaagcgaaaaagaaagaacggccaatgttccctgaaaaccagcatgtcaggtgaggctggctgtgcgtgccccttctccacgtccccaaccccaccaaacccagccagggctcctctggacctggatgtggaacagtaattcatgtgttccctggggggagcctcctagagggcttgggatggacttgtctgggggtgagaaaggtaatgtgggatgtgcccagcttttgagggtggattaggtcaggacggcctcttccctcttcccctaataccctcatctgaggccctaccagaatcagggcctgagctgaaggactgaggggctgtattatccccagtgagcagctgacgtttatttttccctctccaccatcctctgccttgtagatagatcaagaagaaagccctgaatgggcagtcagaagaactgagattcttcatactcttagggcagagatggacaggttcacctcgtgtctctctaggattctaccagggaggctgggctaggagaggggtcagaaacaaaaagttgagggatggggaaaagtgtgagagcctctctgctgggactccaagccatgcctgccttcctccatcctttccttcctcccagggtatatccctagttacctggacaaagacgagcagtgtgtcgtgtgtggggacaaggcaactggttatcactaccgctgtatcacttgtgagggctgcaaggtatggaagctacctcctgcccctcccctgccacctgagcccccatattactccctatgtcacctaaagcccgcctgttaggtcatcac

SEQ ID NO: 1223 - DNA, 935 bp, Homo sapiens
gacttggatttccaaagctgctattccttaaggcctcacattatcccaggttcaaagctgcctgctctagacatcattcctgcctctgccacaaacactacccagacacccccaacccctcagcagcctgggggctgagggcatatatttctcaggtccttgagcctagtaatcttgggctcatggtgtcaggaggatgccaggtcccctcactgatcttgccttccttgctctccacccctgacccctagtaaactgcatggttggttcaggaaggggaagccatgtcatgatcacagcctgctccatctcccccaccccagggcttctttcgccgcacaatccagaagaacctccatcccacctattcctgcaaatatgacagctgctgtgtcattgacaagatcacccgcaatcagtgccagctgtgccgcttcaagaagtgcatcgccgtgggcatggccatggactgtaaggggcccaggtggagggaatagagccaggtggcctggggtggggatgagttctgggagggcagcttccttccagggtaccctcagagcccacagggcagagtggcaatccagtctaggtcagaatgttcagtgtcttggtccttgctgtcctccttcctgcgcaaaaggaaacaggatccctgtgtgggccccaatgcctacctgccttacaacactcgagggccttagagagggagtcgtttggtagaaagagctcctgggcacccactctagcacactgttcttgactcccagcgaaggcaccccacttctagatgagacagggcatcttccattggctggggattgggtggcaggatattcgagtaaccaccgtcaccataatccgttagaccagaacatgatattcatctggatcagcccaaactgttgttgacatggtcccggggattaatcatg

SEQ ID NO: 1224 - DNA, 474 bp, Homo sapiens
gttactaccgttgttattattagctgacttggagctctggttctggtctattctctgctcaagatgaaggaaaagctttgggcctgggactcaggcacgggcggcccctcttccccaagctgccttggagctccccctggtgggcagggagcctcagtgagaggctgaaaggggtctgcggccccagctgacccccgtctttctctctagcccgatgacattggccagtcacccattgtctccatgccggacggagacaaggtggacctggaagccttcagcgagtttaccaagatcatcaccccggccatcacccgtgtggtggactttgccaaaaaactgcccatgttctccgaggtgagtggcagaagtggggagagatgtgatgctgtgctggagggaaacctgctcccccggtcacccagtacaggctcatctgaggttctctggacaaggagcaattcctgtaggtca

SEQ ID NO: 1225 - DNA, 806 bp, Homo sapiens
agccgttcagagtccatgggggccttgcgggcctcacggctcccgtaggacactctaggggagactcaaggacgcggggaggggtatgctgagtgctcctgtggccctgccgctccacagctgccttgcgaagaccagatcatcctcctgaaggggtgctgcatggagatcatgtccctgcgggcggctgtccgctacgaccctgagagcgacaccctgacgctgagtggggagatggctgtcaagcgggagcagctcaagaatggcggcctgggcgtagtctccgacgccatctttgaactgggcaagtcactctctgcctttaacctggatgacacggaagtggctctgctgcaggctgtgctgctaatgtcaacaggtacctgctgattagtcgggagggctcagaagcttccaggggtcccagagattggctggaccctgggcctgttgctcaactccctcctgaatcttcttctgggctacctctctgtcacctgggccatcccctatcccctgttccttgctctgtcacacacttctcactcgttccccaggcccatcccttgcctccccatccctgctctgtgccttttcctgtctttgtctccttccttctcgctgccctgtccctctgtcactcacattcccctttgttccccactccccactttgttctcagccaccttccatcccctcatccctcctctgtctcccagtcccatctcttacccctcagtcccctccctaaccccatctgcaccccgcctctctgaccaccaacctcagtcctccccactccaagg

SEQ ID NO: 1226 - DNA, 1046 bp, Homo sapiens
acagaccgctcgggcctgctgtgtgtggacaagatcgagaagagtcaggaggcgtacctgctggcgttcgagcactacgtcaaccaccgcaaacacaacattccgcacttctggcccaagctgctgatgaaggtgactgacctccgcatgatcggggcctgccacgccagccgcttcctccacatgaaagtcgagtgccccaccgaactcttccccccactcttcctcgaggtctttgaggatcaggaagtctaaagcctcaggcggccagagggtgtgcggagctggtggggaggagcctggagagaaggggcagagctgggggctgagggagacccccccacaccccttctctccttcctctcgtccttggatagattcagctcccacacacacacccgcactgcccaggtccctcctcagacctccagccctgggacagggcaaacaactgaacttgctatggaaaggacagtgtgggaggctgggggagctgtgtcctgcagttcccaggaccccatcctctcagaaggtaggggaagggcgggaggattgagaagggacaagccaccttgaccgtaggggaaggaggaatgtgggctgggggaagatgccctcaactcaccccctacacacacatgagagagagcccccacccagttccttggcctaggtctcccctccaggctgagggcctctctacttccccagatgcctgggtgcaaagaacggcttggcttggctcctcctctggaggttaaaatttatagtcattctaactgcactttggaaaccaagcaaggggagaagacaaatgaagaaaaactagacagagagaaaaatacaaaaaagagagagcgagcgatagagagagatgatattaagttattaactgaggctgaccagaggggaggaccccccctttaccaccccatgcactttgcgagctgccccttcttcccccacatcagagagaaatgcccccacaccagagccccaagggtagggctgccgatcagagctgtgagttaacacaacagggtcct

SEQ ID NO: 1227 - DNA, 1011 bp, Homo sapiens
agctgtgagttaacacaacagggtcctggccaccccccttgccataccccgccctctgtgcccctttggcaccccccaaccctagtatgtcctctgctttctgccactcgtgcccgctgagttccatctacctctcatgctggatgccagctggcccctcaccagcctgccctgctgcccacacagctcccctttaagtgcccagccctaggggcctctccccatccacctcctccttccacaccttggcacccacccaggaaaaaactgtggctccaactcctaccctccttatatcctgcagtattagctagaaaccggatgctgctgcattggttgggtcgggggtaggagggctgtgcgtgagcgtctcccagaaccctccacccctttagcactctgtttccctgtttcccatctgtcttctgggctctctctaacctctgccctcctccccagctcctactcactgcactaactctgggcgggcaggtaccagaatgggggtgtttagataagtgacacttagttggggccccaggggaggggtggtcggtgctcctttttctttaaagctcttttggccagctgcccctctgccccgggaccccttcccctcttcttttctctaattcagggactttggcttgagcccctctcgccctcctggtgagggtgctctgttggtctgcacttgggtgagctgtcctcctccccctccctgtggctgccgcccactcctcaggggagagagggagagaggaggtggtcctcccatgggagcaggaggtggggtgggacagagcagaccagagggtgctgggctcagggctgcatgtcggcagggatggatgggtggacacagatgcccccggaagccatggggattggggcagggggtggggggaggggtgccagggcttcctgcgctttgcactattggggcaaaaatgtcttaagcagtggggaacctgccaccccaccctgaccctcagcctgccacagccccct

SEQ ID NO: 1228 - DNA, 1083 bp, Homo sapiens
ggacatgggaaggcaatgctatgctgcccgtcagggcactgtccttccccaatcgttcaggtgttccaacaggggtggagggcctggaggagcacccgctgtcacctgtgcatgtgcctgtcccaccctgctggggcctcgggctgcccgcgctgtctttgtctctatcctctctctctctcctggagtactgaatcctgtattactccagtcccatgggtaggccctcttgtaccttcctaccacgcctgggggcccagtggaattcctgacctgtctgctgtcttccccatccctccatccccaccccaacccctccatccccattctcagccatggacacggcagagaaaaggccttgaagagccttagcctcttataggcacttgggactcccccaccctccccaatcatatgagctgtgatcccatcctccccggacccctcccttccccctcggtgatgtggggtgtatgtgtgcgttcctctgcgtgaatgtgtgagtgagtacacatggtaggggaggagccagggcgactcaggagtgccacgcacctgctctagagcggcagctgtcccagtccctgctgtggaagtgggggacagggccctctcctgggggccattggtgctaatgagggggatggccttgatgtgggtgctcagcatgcctcccccagtattggcccggggcactagggcaggcagggtggagcagcaggtgcagtatcggtgggaggacgggttgctgggaataggacgagggggccaggccaggacaaggggttgccagagccatgaccactaccccgcccccaccacccgcctctccatctcagtattgcccctcccatcactcataacacacatacctcatccagcctcctccctgctcagacttggggagggtgggggaggagcccctaccccttctcctggtggcgggtctgcagggctgggagagggcagggcgttgtgagagagagaccgtccataaggaggacagtaactcctgccctgggaactcctgggcgggggggagggggacactgcccagaggcgctactgaatgtatgagaagct

SEQ ID NO: 1229 - DNA, 1165 bp, Homo sapiens
tactgaatgtatgagaagctggtgctgggctggggggaggggggttgtggccagaaacagggaaggaggtaggtctcttccccagggaggggtgggaccggcaggggtgacttgaggggctcctactcctgccccacgttgacaatcagtatgtctgttatgtgcgatttttcaccccgttgtgttttgggtcaggattttaaagaaagatatttttatggtaattgttgctcgtctattttactatatatttatgtaataaatatatgatgaaaataacccccttgggcaccccccttagacttgtgtgctgtttccctatatcctcccatctgctggcagagtacccaccccacaaactgaccagatggagaggtggccccccccagccttggcagtatttccaccccaccccccaaacgagcacacaccacagaagccagctcagctgtgaactattggatttgagacaggaacagaacaaatcagagggccaggggagggttgtgggggagacagagtggtttaaataggggaggaggggaagttcggtgatgggggagggaggcaggtatttacaagaaggctcagggggccagaggctcatcttggaatattttataacaatataaataagattctggtttgcttttccttttcgtctcgtaaaggagagagaagtgcagagttcgattctgtacaagggggcagcggcagaaggccggccgggcgggtcactgggcgtccacccggaaggacagcagcttctcggaatgcatgttgttcagggtccgcaggtccggcagcttgagcagcagcttggtgaagcgggaagtctccaagggccggttcttcagcaccagagcccgaagagcccgcagcagcgtctcctggagctgctccaccgaagcggaattctccatgcccgagcggtctgtggggaagacgacagcagtgaggcggactccccgagctcctctgaggaggaaccggaggtctgcgaggacctggcaggcaatgcagcctctccctgaagccccccagaaggccgatggggaaggagaaggagtgccataccttctcccaggcctctgccccaagagcaggaggtgcctgaaagctgggagcgtgggctcagcagggctggtcacctcccatcccgtaa

SEQ ID NO: 1230 - DNA, 408 bp, Homo sapiens
tgaactgcgtctgcctcctcccccgggtcaggcgagagcctgacctacctgcagagacaagcaccaccgcggtgaagaggcccagctcctcctcggtaagcgccagggagttgagcttctcgctgaagtcgaacatggcactgagcaggtctcccatgcccatggcaccaagctcctgcaggctgtaggtggtgcggcttaggaacatcactgtctggtccttcacgttgaacaacgaagcaaagcgcaccatcagcacctaggagggaaggggaacagtcatcctgggtgtggtgggaggagcactgaccaaatcgcccctgtagtttgccagagggtttagcggtgctgccttcgatttctcagtagagtgggggttgtttctgaatggccaatgagggagcccag

SEQ ID NO: 1231 - DNA, 1135 bp, Homo sapiens
ccagaagcataaacggtcactcacctcaaaggtgccagccttaagcagggtgacttggtcatgctgagaaaggtcacggaagcccgggatgtgtttggcaaactctaccacctcccgcacagcgggcgtgaagctcatggagaaatcctcccagatctcctgcaccgttcgcccactgcgtccatgcgggtacatgttcataggacatgcctgggggaggaaaagattgaaggaggggagtgtcagccaggctgggtcagatggacgccccgagcagagctggaccccagattctgcctgggctaggggctgtggccctgaaggatgggtctttcagataaagtagcaattaggtgccaggtggagattagggattcccaggcagagtccagactgcaaggcaagacattttctcctgggaagatgctatccccacactcagcctccaggaacccccagctgccctacactaagtccattctgccaggcccccccaatcttcttaacgcactcgcccgcccccatgcccttaccagcagaacattctttgagttgccctgccggggactgttggcaggtgccttgccttctggggctgcatacacgtgggtggggcatagacggtgcccgttgctgttggactggtggcagctgtggtgtgcagggccaggaggccaggtgggagggtaggaggagggagcctggcgcagaccatttagggcctcgttatgacgctgggcagccaaggtgttgttgtcattgggggcaggtgggcagccctgattttcccagcgatgtggggtggtggctggagggctacctgatgcatggttggcattgaagttgccaggtgagctgcccagcttgtcatgggcgtaggtgaagatctctcgatgggcccgggccacctgggatatcacatcctccactgtgggctcagggcttggggatctgggaggcgtcagctgttgtggaaactgggagaagcccaccaggggtgaggggaccggagcagggggtggcgaggggcccatggggcctggggtggggtgctgggtgggtgaagtctccagcgggcactggctgctcaactggttgttggccaggttcatggcactctgcatctcagcaagca

SEQ ID NO: 1232 - DNA, 1131 bp, Homo sapiens
atggcactctgcatctcagcaagcatccgctgcttctctcgtttggggatgcgcccaaaacgcacagctgcaacaggatgagaacagcatcaggaagttctcaaccatgctcacgtgcttctcttccttccttcctcctgaaagggcaaggccctgaaggcttggggtttcacatcaaaactaaaaccagcaagtccccacccatcaagggggtttccctaggagggattgctggtaggaggtgacccgagggaccaatgggatagaagtatatgttgacccaagcaaatgaaggatggacatcccctggcacatgtgattcacagtatgatgtgtctccatttgtgacttttttaaagggaaggattaattcagaaactttgggcggaagaaggggggaggatgtggggatgctgcctcaccgtctcgagacatgcccacagagagacacttcttgaagcgacattgctggcagcggttgcgattgatgcggacgatggagcaattctcattcttcagacaccttttgtactggatgttctgctggatgctccgacggaaaaagccctggagggcaggggtggttagtgaccacctccatcatggctgggcctctgtgtccagggggagggggccacctgcccctgcccttacccccagtccgcctcaccttgcagccctcgcaggcgtgcacaccgtagtggaagcccgaggcaacgtccccacacactttacacagtaacaccatgccattcagctctgtggaagagacgggcagcaggtgagcaggagaggccaggctgagtggccacaggtgtggaggctttctgggccggagatccagggagggaaaagctaaggaggaactccagtgttgaggggcactggagtgacaaaactgggctgaagaggggctggtgccactctaggagaaatccctgaagccagaataggtcctggcaagactggtgtcacgtaaaaacccattcccaatctggccctggcctgcttcccttcccccgaatcagctggaaaggtactcactggtgatgttgctggtgctcttgctgggggacactcggctgctgtcctccatggccacttgtagactcccaggggggctcccattat

SEQ ID NO: 1233 - DNA, 1369 bp, Homo sapiens
ccgtcatcactcaggctgggtggaatgctcccaaaggagcgagccgggtcttgggtgagggagccagtgggggatggtgggaagtaggtgggacagccttgggtcagggactggaagctgccattggagttgtcactatagagggattcagggctggtgcggcttggggaggagccactggagccaatgtaggtgatgacgccacctggagagagaacaaaaggaaagggggtgtcagccgccatgtctccggacctagggtgccactgtgctcatccccacctgtctgcccaaaacattgctggccactcagttcaccatgtggagcccctaatcttggagttaataagcaattccccaacacacagtagacatggcatggccaagcaacacctacgaccctttgcaggccaccttcagcttctgctttcagtatgaggcatgacccctgtggcatctcgcatatgtgccccccttccttagttgccttccttgggaatatcgactgcagctaatgacttagttgtcagttgaagatctggggatgggatgggcagctgagcaccattcaaagtgcccagtcctccaaaaacaaaaacccagctgctgattttaacactaagaccattccaggaatgagaccatggaccatggagagataggtagccaacagtaaagagaatggagggtttacaaaagtaagacagtcacattccccccagttggggacatatattctctgaaggaaatgaagggaaggaatctgcccagcctggttcccctggcctcttaagagagtgagccacagtggagtctatccctgtgtccaaaaaggacttcgaggtgcgagttgcaggaggtggaagtacaaactgtccagcctggggctctaaaattcccccttcagatctcagcctggtaacaatgaccttggctctctggccattcagggactttgaccctctggttacattgccaatgaggtggctgtgctcccgtggtattagcaggagaaaaaggtgacctgcctgccacacctccggcaagcacctagattggtctgccatgggcggggtgggagaagggaggatcccaggacacatgtgacctaacacatgccatgccactgtgtctgcagaggcacatgtcttgctcacccactgacacacactgaactgggcagggcggccctaaaatagctcaaggttggtcagggtgaacccagctccttggaaaatagttgcacaacagatcagctcccccggtttcagggctgaggtgggggatggaatcattagttggcagtaaatgaagttgacctagttcacccatcccccaaaaaggagtgagaccttcatgcagaggcttc

SEQ ID NO: 1234 - DNA, 1381 bp, Homo sapiens
ggggtgcagttgctttggggagcccttagtaggcaaactgcagcttgtctggtggagatgggggtaagacaatgctcgcagaactaaggagagagaagcttggggaacaggaatttgtaatgtggggaagctgagtctaaatgcagtacggtgaagtaggtgcaaataagagtgaagtggaaaggagtgagaagggtggttaggggtgaggtctctttagggagtgtaaaacagaaggccatgaaaggtcaggaatggctccatgttactttgttttggtgatgggggagggggccgggcaggcggaccggaaaaggaggcaggcgggggcggtgagtcagcccagcttcacccagatctcggcggggcggggcagggcgggagctgggccctcagccggcctcacgtccctgctccacgtgtgcctctcgcacgtggctccccaacgaggaaccccggaactcgaggccccgccctcctcgcttcccgtcaatcgagagcagtcgccccgcctcctacccgcccttccccggccaccaggtcgtgggctggaccccgaacgatagcagggccaggacaacctaggggaggagagaagggaacacgcgttgccggggcgaccgggggggcggagctcattatgtaacgaggccgggaggcaacgaccaatggggtggcagccacggcttctgctgaatgaaaacaaacgcagcacgtgggcccggctctagagccatgtgagccctcccggcggccggagccctgtaggtgccctccctcgggccgggcaccacgctctggactcctcaagtgtcgctccctcctgtcactgaggattccccagtgagatccgaacgattctcccagcccctccttccctgaaccccatcgcgccactcttctcagattccctcgcgcctgcaggaactagaggagggggaagacaagaggggagggggtccgttttctgaggccaggcatactacagctgcaggtagtggacagatggggccgtttcggggcactgttccaaagctcccagtccccctaaattcttcgcttcaccacccgtacctcctctccatttcctcctgcccagggattcgaggctcaagggagctttgggactctgaggggtggtgatggggcgtttctgagagcatttccagcccgaacaagccgctctggaaatcccacactaaagcaccgcagcacgttagcaaatctccgggccgagggacaccccagtcccttacaaagttcctctttttataaggcgtagatggaggtggggagacagtgacagggaaaagatgatagtaaagaaatctcagtacctgtgttgttgttggagtccagggtcgtcatgtcttcaccagct

SEQ ID NO: 1235 - DNA, 1391 bp, Homo sapiens
agggtcgtcatgtcttcaccagctgagagcggtcattcaaactggaccttgactcaaactagaggttgcgatcgccgctgttgccccctgggcactggctaagggcggggagtggaccccgcgactcacgatcaggatccgaagcaccctgcagcaaggtcttggggtggccggactgcagccctgcagaagggttggacgttgaggcaacggagttctgctttgcatgggaagagcagagagagtgtgtagggggaatcagcctgcagtagttctggctagaaggtagcaaggagggtcgggtctctgcagtgtacggggtgcctctgcctgccggctccgcagcgctgcggggtggcgaatctggagctcccggtgcaaaagtcccagaggaagagaggttgcaaccaggaagtaagtaggtgatggggagaaacggggcaccgagtcgcaaagaggcgagacgtgtgccctgctacgttccctcggcagtaatatttcactctgccaatctcagccgccttttgcccgagcctttccctgggacagagggctctgcgcaggcgccagcagcccagggttcccgggccgcacgcggcactggagcaggtaccatgtgatcccagggagcgcctcgtgccccagtgacacacttttccaacagccggcacgttgagctcttgcgcgcctgcgcaacgacaagactgtcgggatttgtagtccaccgacaaagtgggcggactgcgtgcctttcccctttctgcctggcaaagcgcttgccgggacctgggaggagctgagagtggggtggggtggggtgcgctgaagagtcagggtggcgtgtttagaaagcctgtatggcaggggcatgtgaatttctggggagggactggcaagcttgtttgctgtctgggagatcaaagctaagaggccctttctgcaaaccttgcaaacgtgagggcttcacgtgattgcaggactgacctcgtcctgaggttactggtgaccgggagagagagaagccggggagggagatttccctggagtcaggagcttaggctgccctctgcttcagggcaaagtccagagaaggaaaggaaatgtgaccccctttcccttctactcgccttagggagaacacctccaggggaaggagttcccacagaggtagggatgtctgtagggactccctgtttgcttgtatgacaccattccacccactccagttgactttggggtgagtcatttccctttgtctgggaaataaaaaggacaacagaggggaactaatagtgaaagtgctttgaggtcctaaagtaatggggaagaggtgaggcagggggtgggggcagagtgacacccctgcccctcggtgctggaggataaaatat

SEQ ID NO: 1236 - DNA, 1160 bp, Homo sapiens
tatgagcacaggagtaaactgggtagtgaggacagtgaggttgactgcaggagcttgaccactcaccctctgactccttgtagaagatgagcttcctggaatgggctaggctttagctttgttctcctgctcccaagaaaagtgggagagagagggcagtgggctcttctctggccctttggcccagagttgggaagctgcagcagagtgtgggagcaactgggaggggctaaaacaaacaaggaaagaggcttttcaggaaaacttggttctcagcctccaccccctctccctccaccctctgggctctggagggaaagctaggaggtgaattgccctgtcctgcccttgcctgctctctgtgaccttgactccaagtcagagccagggccagagcccaggtgtctgtcagggctggactcaaaatcaggacccctggcgtgcatctagctccccacagcacagcaccaccactagcaccctccctttacttggccggggtcctccccaaggcccacagctctgtttgctgctgtggaggtcctacccaccccctgtatacttgctggatgtttgttcttctaggagtgggagctggggtgggtcaagactcctcgcctgctgcaatcagtgagaaggaggagggagcagaggtagagagagctgaaattcagtcagcctgactctcctcttggcaaaacctgggtggttctgcagtctgtgtgtggtgtgaaggcagaggctgggagggagggggcaaaggagaggggttacccccttgctccttccttccttcctttccatttcttatagggcccttccttttctccctcacaagtaattcgggtgtctttcttctacagctggtgagaggagtacagaatgaaaaggcagggttctctcttggccccagaagcttctagtcagtctgtgtaccctgctcctttctctgtcagcagctgctgggagaagggcagaaactctgagacccaaagccaccaaagggaggggggaaaggctgggttgtctggctctgggtgattcggagtagaatcttggtttctctttgacctcaaccttggctgtaagaccttaagacaacaggtgtatctcaacacaaccttcctcacctatccctccagctggacattgctgttcac

SEQ ID NO: 1237 - DNA, 453 bp, Homo sapiens
gggtgggtccttgctggaaacaggtcaggcttctgtagatgccttcccatccccctcctttctcaccaagaaaccattgcccagagtagaaacctgtctgcccaggtgatgcaaacctggtatagaaatgctggggatgcccctgaatcagggaaccagccatgtgcctgggagagactcactccctgccctcctaaatccttttctttgtctctaaaaggccagctatctttcccaaccccacccaaagcctggatgttttggggagaactttaagaacatgccacaggaaggacagagtctgagctaacttgtttctcagtgtggtggggggagggggatggagaaagcaagggcgaggcatgagccagggctgggttccatggatgtgttttgcctcagattctatctttacctcactactgctttttccaaggaaaggaaaccataaat

SEQ ID NO: 1238 - DNA, 1513 bp, Homo sapiens
gccagagggtctaggtgattagtcttgaagctgtaatttgcatagcacttaagactgagaagatgtccatcaaagaatgatagcgcggatggagattattggaggggctaaatctcccctctagctatctcttgaactaccactgtcagcgtcacaatgaaaatggcaatgctggggattcaaccccaggcgtgaagatgaaactctttctgctagcaagactgcccctcctagagagattactgccaccctaggggaacgtctgagcagcaaactcatcctggtgtttcccaagcaatggtgatgcttggaagtgggatatatcaccaagaacagaagcctgaagcaccccttgtccctgtcccagggagtacctcagctttccaaaatctctcttttaaccccaggcacatttcctcttcccctaaactcttcccactccccgtcctacatttccctcatctggttctaaaagtagaaggggcaggaacagggtgcacaaaccacagactgctatagaggtgactaacagaaacaggcgtctgaactctcttctctacccaaaccctctgaatttggggtctgctgctggtggtgaggagagtggggcaagtaggtcagggccctctgaagtcccatggtgcttcattccaggagctgtattaagaagattggttgagggagcgtgtggaaggccaccaaggaccaacaaaagttgtgtccaaagccttaaggaaacagcatcccacttccccatttacctgcttgagcaacgtgcacctctaaaaccagcccttccgaaagccactgtcctgggccaatgcttcttcagcagatgctttgaagaacctgaagaagggtcccctctctcagaacctaggatctcacccacatcacaggatcctggaggaggcatggattgtccttggcagtggagactaagccccagatgaccctttttctggcatccagtacatgctctgctaaggcctcctgtccaatctttgccatgctgctggagccacagtggtatcatcttccaggcccctgcacctgcccattggctgcccttgagcctctgtagaactcagatgcagggagaatgtgggggaggtggaggaaagggagagggggtgctctgcatctgcttccatctctaccctttatcccaagctccatctcaaaccctctccttatccagtgtctctccatcctttgggcctctgcagatcaccattagctgcctggggaggccagaggctcatgacagtcctcgtgagcagaatggacctcggaggagcggtggcctgggcaggcattaggggccttgtgtagcttctgggaggcttacataaacactggctgggatggggaggaaaggggggttgcaatggctgcccagggaaaaaagcaacccccgcccggccggctcagcctgagtggaaagaaggaacaaggcttactttccctcctctcactcctctcccctggtctgcagctgttagtcgggctg

SEQ ID NO: 1239 - DNA, 1645 bp, Homo sapiens
tgcagctgttagtcgggctggaaagactgcggtatcttgggggagggggggcaggagaaggagagagagaggatgcgacttcacaaatttgggatccctcctcctcttctaaattggggggagggcgagtggggaagaagcagtttgccaaagagattttcaatgccgcaggaaggagctttggctcattagaatgcgcagtttgcaccctggaaaaaaaaaatctgtgctggttgcaaaaatgcagacgtgtgtaggggcccagcggagattaaaaaaaaaaaaaaaaagcgctagctctgcaatgcaggatctgcgaagttttggtgcgatgaggaaatgtgggtcgtgctcatttcatttgcttgttcctgctaacctactgtccccctgactctagcatagtctcatagcccagcaagaggcaccgcagcttagaaatggggtcacgagtagggggcagaagcagagagccagaagtgggggtctgtggttagagtgcccagagaaggaccaatggaggttagagggccaggcagatggaagggggcacttcaatgagggatggaggctgaatttgccttttgcacacgcatttgttctgcagctacacaggggttattgggaaagcccttctaggtttcctccagccctcggctcttccccatctccaagtagcagagggactttccccttccggtccactaacctcacagaccactgttgcagaacctttgcttcatgtccccaaacacacaaatccctgaactgtccttgttctaaccctggagggggcacttgctgcgtgtgtgtgtcatcctccttcctagaaagaggggacagggtagcctgatttggggagcccaggctacagggaagccaagtcttggctctgggcagacatcaacacatcaccatgagggctggggtgggctgttctgtgttcttggcttgggaaggtcctttgttcttttgaggcttagggttctgggttgtgaaaacaccaaggggctgcctgggaggaaaatatgcttggggagaccatgtttcttttctgggtgtttgctcccctggtggctcaggagagacaaaaggagacagaagcaggataaagcgcaaggagacaagaagggagccccgcgcgctttccctccttcctcatcttgcctcctgtttctctggcccacggaggaaggggcccagtgtgtttgtgccggctcgaggctcacgcgggctgccggggtcacatggcccgggcatgtgcagcctgctccatttctaccacaacaactcgctcataaacagcccggctgctgcggcggtggcggtggagacatgtgcaagcgagggggtggggcacgtggccctgcccgagccaagggaaggcgctcgctcagcactgcctccacccctccccagcactggcgctgcctcgtcacaggaaattcctagtgctcctgttgctgctgcaaaacatgttttggggaagtgactttcaataaggatggaatcaatggactatttaaaaagagacagaatggataatcagttagagaccgacttacgcctgcccttaccctctcttaagatctctgtactggttagggtggtaccagttccttcctcctatataaaattggaacca

SEQ ID NO: 1240 - DNA, 1185 bp, Homo sapiens
tctgggggcatgtctaccttccccctttgtgctgcttcatctcaaagtccagccacagggcgtaatcagatttagtttgactcagagtaaaaagcatttattgagtgcctcctgtgtgcagattctggaaatgcgggcaaatggcacaacagtagtaggctaatgagtagctgagatctcaaagaggagtggaaggtactgggtgaggggagagtgaaagaaagaaaaggttagaattttatttgtttatcctttctccatcttacctacttttcttcctgtcccgaggctcctattagaacaaatgattgtggcttaaattgttttgaggctggaggtagaaattaagcccttatctatttttgctggccatggggaccccaagttagttaacagccataggctcttgacttcccatgagtaactaaaagaagatgaggaccatgcacacaggcacacacaaacactccctgcgatctcagatgctagggtagggagaccaagagaaggaatgaagtcccagaaggttggaagttccctgggtaaaatgagtttagcagataacaagcaggaaaagtctttcaataggggagggcggggtcatccctggcctactccaccttcctgagacccagaaactgtggccagaggaaacaaagggtccctaaggcaaatcacaaaagctcctgagaatgaaacctgagcctggaaagagagtagagaatgagggatggacaccagatccaaagggttcccttacacaggcaaatgggggttagggggttgggagggatgtgagccatgcccagcccctctccttgggccttctctccatcacaggcagttctcaggagcagaactcctgttactgtctcagtctgagcagctgactcctggcctctccctgcttcattttttgaggaataagcttttctctgattctcacagagccctttcttttgcttctctgcaaggctttctctctgtgcctgaaaggctctgggctcaaggagcagacagccctgcaggctcaactgcagtgacctacattggctctcccctaggccctgggtgcgggggctgagatttcaagataggaacctgggaatctggcacaggtctacagatgatgacatcaggcagacaggctgcaaaagtggcattgagggactggaccctgaggca

SEQ ID NO: 1241 - DNA, 1169 bp, Homo sapiens
ggactggaccctgaggcaggggatgccataggactatgttctcactttgtcatttgagggctttttatggacaagagatcagaagagatcaaatgcaaaaacacctgagcagtgaccccttggagaggagccagtggtccctgacaggcccagtctctattaatgagatttgggagtggtttctgcctgctccctgttcttgctgaacctacactggtctgctgcaggggactggaaagatgatgtggaagaatgagttcggatttcagctgatttatttcagggaaacgaaggctgggtaaaagtcagatatgcagaaatccacgtactcccaggcttaactataatatagagaccctgtatttctttagactcaatggttctgagaaggatccagaaggagccctcaagattaattaccatttacaaagtccttacctcaggaccctggcaactgaatccctccttccagctaccagccttctggaacagagaaggcagcttctgaaataggtgctttccctctctcccactataagccacagtgtttaggatgaccactgcttccagattgtgtgatttgccctggcaaggaaatcctattgtggggggaggaaatgaggcagtcgtgacacaaagtgatggatgagccttttgcttagcagagagagagagaaagccggcaggctgtgcagaactgagtggctcttgggtccaaagggcttccccttggccaagtcccaccccaaagcccaggaagtccacagcttggcgcccagtcaaggcaaaaacattcctcaggactctgacaggctgggggatggttcccaccacgaggatgggggaggggaaggaaacacgcgggggaggaaatgaccacaaagaagggggtgagggtaagaggtggggagtgagttctcagtgccctgagtcccttttagagagaaaggttgaggctggactcattggcttgtgaaggacttgcagcttcagagcacatgacttctgggtcacccttctgctcagggtcatccctgatgacccaaggtgtcctctggaggcttgttaactcaatctccctccttacgcaggggctgtggttgagcttgggagcccctgagtggctaaaagctggaattgcagttgtgctgggggaggagcccatcggg

SEQ ID NO: 1242 - DNA, 380 bp, Homo sapiens
tacacacacggaaaaataggtgccccaggactacttccattgtcttccataaattactgtttaacatgcccctgggtagtgtgcttcctggctactgagatccccctcctagggctccccggcttgtagcttctggaccattcactgtccatgacccctatgaccttggagggagaaatggccccacaataattctgattttaaatttacccctccctacctgcactacttagtcctagttttcctcctctgagccttgcccacaactccttccccaagtcagcctccaaccttgaatgttccctcacccccagttccctacccaatcccccaatcccacatctcctgtaggggataggagtgaggtgaaaaatggacaa

SEQ ID NO: 1243 - DNA, 1805 bp, Homo sapiens
cttagtggtccacctgggaactctatggaggaaactgcctttgagattgtaccccccaccccaagcccatttggaagggagggtcattcctggcggggagaagccatgaagcaggcagggtgaatgtgagctggggcccaggagggcaggagagggcactgctgcaggggagagcaggcaagcaaaagcgaggaccaggcaggggtcaaggctggggccttttggagctgccagtgtggtcctcagatggctaccccaagctggttcttggcaagtggcaccctggcatggagacccagcccctgcctctcctcccactgcttccccctccctgcatacccacactgaatttgcatgaatgccacctcctctggggagcctccccagattgaaccctggtggagcacctaccacttcctattgacatgtacatctgtggttctgtgccccctcctaccccagcccactgtgtgcccagcaccagcacatagcttgcgcctgacacacagaaaggactctggaaaccaggaaggaggtgggcagagaggcagaaaagctatgaacattcagacctgagatgactgggccctatagcaggtagagagggagcagagaggaagggctgcgggcttcccaggggcccaaggacagagaattggcaaagatatgtcttaaacatctagcctgggagagcatgaatggagccaattcctgagcacttactaccggccaggtgctaggcctgggtcttggcacaaccataacgccaatgacaggggctggaagtacagcagtaacaccaagagtatctggaaacccagcagccaggttctggggagcccaccatcctgtcattatcacaccctccagggtgaggccggcagataaagagtttggcccctgtgcccccaccgttcccatccccacccatgtcaggctcccagctcaggcctcgaggtcaagtcctgcctatccaggctggaaggagttgaacagagagggcctcagctgcaggctggacatccctggaggcagccaggcggcagacccggaccagtggaccctagggctgcaggagaccaggccctgactcctgtgcagaggggaagggtgggccacccgcagcccagcatgcacagagctccctgggaggccaagtggcctacgcctgtcaccttcacctctgcatctcaggggcccacaggaagtgcctgcttggcctcagtttaaagcagaggaaaccatggggtgagaggggaggagggaggtagtggagagggaagctgggtttcctgtcatatgacccctcctctgggctccctcaccaccctgcctggcttggcaggagtcgtctgagaaggggactcctccagggacttggtccctaggtccccaggtgagctggatgtccagtggagggagaatgcagagggtgaggggctgtgggggccagctagagccctgcaagggtagcagtgggtccctgctcctgtccccacggctggggctgtagccacaggtcctcatcaggggctcgcggggtacctgggactggaggctggaccacaagaaggaagacagaagggggtcccccgacatccagagtcagatgtggcagatgccgagtcccaggaactgtggggtttgggacacaggctcttccggaagggcaaactgccacgtggagaagagagggaattgtctctccttggggtgacggtgggcccaggcacaggtggatgcggggtgcagcaggtcttggctttctttgcctgtgccggtccagactttctgtgccctttgga

SEQ ID NO: 1244 - DNA, 1828 bp, Homo sapiens
cggaggtggcagagcggcagacccgggcaagtgaaccctagggctgcaggagcccaggccccgacgccggcgcagaggggacggaagggcccgcccccagcccagcgtgcacagaggccatagccaaggccttaaggctcatccaaccggggactcatatcccccccaccggcagcccggcgccccagcctctacccgtgcccgccgagatgctgctgccgcggtcggtgtcatcggagcgggcccctggggtgccggagccggaggagctgtgggaggcagagatggagcggctgcgcggctctgggacgcccgtgcgcgggctgccctatgccatgatggacaagcgcctcatctggtgggtgccacgcgggcgccagacggtgcgtggggggggtgctgcgaggctgccccgtcggatggtgtgggagcaccccgtctgcttggcccgggtgggcagggcgggtgactcaggggcgcccctgtcaccacccccgtccaggcagctgcgggagcccgcgggggtgcagaccttgcgctggcagcggtggcagcgccggcggcagacggtggaaaggcgcctgcgggaggcagcgcagcggctggcccggggccttgggctctgggagggggcgctctacgagatcgggggtaggacccgcgcgacccgcacctccccttgccctctctggagccccactgcccagatcggaaaaaggagagtggcatcatcccacctgccttcacccgggtcccccgaccaatcggcccctcccccctcccaccccttccgcccgcaggcaccgcaaacctcgggcccacgcagcacccccaggtgactgtcagcggtacctccggactcgggcgggtgggagcctggcgggcaccccacgccgtccggtgggcccgcccttggactctcagcgcggccccagccccggccccggcctccctgacccaccctgctctcccactgcaggcctcttcggcacaggaattcggtcctacttcaccttcctccgcttcctgctgctactcaacctgctgagcctgctgctcaccgcaagcttcgtgctgctgcccctggtctggctccgcccccctgacccaggccccaccctgaacttgagtgagtgtgaggcccaccaggggaagtgctccggtgcccacctgcgccatgggggggctggcccagggcccagagcgtggcgacaacgctgggcgtggtcctgccgtgcaggccccggggctctctctccctgacctcgccttgtgtggggcacgcctttggcacatcctcagccccctgcccaggcctccccagggttgggggttatagagcagtagccgcagagcctcacctatgccttggggatccctctctattgacccccttcctcctcaacagccctccagtgccctggtagccgccagtccccgcctggcgttttgaggttccacaatcaactttggcatgttttgactggcagggtgagtgaggtctgtcccggctatggtccagagtctgggagacccagggaactggcttcaggggacacaagtctaagaggacctctgctcctccagggacatttcggctcctcaggggatggtcttacctagacagactggcctggccggtggtggggttagagagaggctgaggccactgtgcccaacatagactcatggacacatgcccgtggtcctcagagcccagctggtgtaggcggtgccagggacaaagggggaaaagtgccccggcctctgggagaagcacttccccaccctcatcctgggaagccatcgagtggtcaccaatggggtt

SEQ ID NO: 1245 - DNA, 784 bp, Homo sapiens
tcacccgggctgggtatcttcgtcgctgtccccaggccttcaccaacacctatctcttctacggtgcgtaccgagtggggccggagagcagctccgtgtacagcatccgcctggcctacctcctcagcccgctggcctgcctgctcctctgcttctgtgggactctgcggcggtgagagcgaggtccacaccttcaccccttccccagggaatcttccctgatcaccccttccttggcagggtaccctcccattggcaggaaggcccatggcccggcacagcaggctcctgggtgcttcctcagcccaggctctggccgcaaaccttaggaacagggccaccgccccctaccccgactcctcactcaccaggacctgcacctggggctgcaggggccttcccagacccagagccgagccaaggctgaggctggatggtagaggtgcccctcctccagcagcccctggtctcctgccccgcaggatggtgaaggggctgccgcagaagactctgctgggtcagggctatcaggcgcctctcagcgccaaggtcttctcctcatgggacttctgcatccgggtgcaggaagcagccaccatcaagaagcatgagatcagcaacgagttcaaggtgtgtgcacgagtgagtgcctgagatccacaagctccaggtatatgggagcgagtgcgtgagagccacgtgttccaggtgtgtgcgagcaagtgcgaccgtgccagtgtgtgtgagcgtgtgtgggagggagcctgtgggagcgtgatggaga

SEQ ID NO: 1246 - DNA, 648 bp, Homo sapiens
ggccaaggcaggcgggctcccactggatattcccgccaactgccaggctgctgcagggaatagcttacaggcgaccctattctgggcctgccccagagttacactttagggcactgtggggggcggggagcagacaggggccccccagcacgcgggctcccctgacctgccttttcccgcaggagtccctgtttctgctgctccagtacctgccccctggggtcatcgccctggtcaacttcctgggtcccctgctgttcacatttctggtccagctggagaactaccctcccaacacggaggtcaacctcactctgatctggtgagtgccacccttggtggggacaagtgggcatgtaacaagtctgcatcctgctgctctcttttggttgtcacctggcacctggggtccccagctgagaggcttcccccttcactagtggcccaagggaaggcaggtacacacctcacagcacacgacctcagggccccaggtctaaggctttccaatcccccacctccaaaggaagccgccagtctggaccaagctccggccattcagtggagcaagggactgtggccaggggtgctgggaatgggctttgcacacaggaaaaccagcaacacgggacatgcagagcttctaca

SEQ ID NO: 1247 - DNA, 1213 bp, Homo sapiens
ccctttttcccatgaatcgcctggagactcggactctgagaacgcactttggaccacattgccacagacagagcaggttggaaggaggctgggcccaggacacaacatgatcccactcggacatcagccacacctatagcctgggtagagcccggtgcccatgtgcctgggcccctccacctgacaaggtccctgcccccaggtgcgtggtgctgaagctggccagcttggggatgttctccgtctccctgggtcagaccatactgtgcattggcagagacaagagcagctgtgagtcctacggctacaacgtttgtgactatcaggtggctggcagcccggcggggcctgtccctcccttccttctccccaaaaagctcacctcaaactgtgcagagccctgttcctgcccctttagtcacctttgagagaagctgtgagcagggctgcctgcaccgccgcacacctccagggggcgccactgctgccacatggtgtagtgtggctgccctggctgtggggcttcctgctctaatcccatcctcaaggcctgggtttcaacctaacgattctatcagacaccaggcaaggcacctgcaccacagaaaccctcacaggaggctaagggaaggaagggccggggtggccgtgagtggtgacgggtccccttcccctgcaccccagtgctgggagaactccgtgggggaggagctgtacaagctgagtatcttcaacttcctcctcaccgtggccttcgccttcctggtcaccctgcctcggaggtgagccccggggtgacacctccagaagggcgggggtgccgcgagcatgttgggggtggccagtggctacagccaagggtgagcgggtccagtgtggagcccgggagtaagtggcaggctgtggccatgaccaatacagcccacgcatctgtctggagtggtgagtacctggaccctcccatccctgcaggctgctggtggaccggttctcaggccggttctgggcctggctggaacgggaggagttcctggtccccaagaatgtgctggacatcgtggcggggcagacggtcacctggatgggcctcttctactgccccctgctgcccctgctgaatagcgtcttcctcttcctcaccttctacatcaagaaggtgacggctcatggctggggggtatggggttcgtgcctctgggtggatgccttgagc

SEQ ID NO: 1248 - DNA, 1242 bp, Homo sapiens
ctgggtggatgccttgagctgggctcgcctcctgctcctgctcctgcccccttccctgggtgtcagccccctggggtctgcataactcgctgactcctggttgctattgcttgcgcccccagtacaccctcctgaagaactccagggcatcttcgcggcccttccgtgcctccagctccaccttcttcttccagctagtgctcctcctgggcctgcttctggctgcagtgcccctgggctatgtggtcagcaggtgaggggaagaggaggggggcacccagaggctggcaggggcagtttctcacccaggaccctgatgccagccccacttggccatctctcgccagcatccactcctcctgggactgcggcctcttcaccaactactcagcaccctggcaagtggtcccggagctggtggcccttgggctcccgcccattggccagcgtgccctccactacctgggctcccacgccttcagcttccccctcctcatcatgctcaggttctcagggcagccggggccatgggaggggacacctggagggggaggtccttccttccatgggggtggtgagcctgtgcacccccaaccaggagccagacgcagaaagccaagggaagcaggggcctctgaaaagcaggaacctcctgggcccaccctctgggctgccatggggattgcaggatcactggggaagcaccgtgtctgggtggctgcagctgctgagctattggtattgctgtgccagaggggaggggatgaggggctctgcgaggaaggagaggagggtcccatcctcagatacagcagtgtgcagtgagaagaccccagtaccgcgtattgtagagattgaggtggggagagaggaagtcagggagaggcgcctgtggccccaggggcaactgaccacgaatccccttcccacccaagccttgtcctgacggtgtgcgtctcccagacccaggccaatgccagggccatccacaggctccggaagcagctggtgtgggtgagtgtcctcggggctggtgaggggacagcagcttcagtggaaacccttccctatgtgtggccgagggcctagaacacgtctgagcgggtcaggtgggttcttcccactggagggcgtggcctcaggctgagagtgaagacggggaaggggaggaagagaacagctcgggctcctgagaccaggagccagacctggtaagtacatgaccttaggggctgggccttt

SEQ ID NO: 1249 - DNA, 937 bp, Homo sapiens
ttacgactttaggcttggggccaggggcttaatggagctgagggaggaacagtgacctggctaaggcgtggcctcagggtggggcctctaccgggggcgtggccttgggctgcttggggacggactcttagcgggcgtggtctagatctgcatggggtgggaccctagtggggcgtggtctcagggtgcgttgggggcggggcccttggaggtcgtggtctcgggcggggacgtggaaggagtggcatctggctgcgttgtggacgggactcctgagggcgtggtctagggctgcatcggggcgggaccctggtggggcgtggccctgggagggtgtggcctcgagcggggcgtggcctcgggcggggcgtggcctctggctactttgggtgcgggctggcccatgggccgcagagttgctgccgctgctgtcctcacacccgctcgtgggaagcagcgcctgtcgcaactcgccacttgttctcctcacagcaggttcaggagaagtggcacctggtggaggacctgtcgcgactgctgccggagccaggcccgagcgactctccgggccccaagtaccctgcctcccaagcttcgcgcccgcagtccttctgccccggatgcccatgccctggctccccgggccaccaggccccgcggccgggcccctccgtcgtggatgccgcgggactgcgttccccttgccctggacagcacggtgccccggcctccgcccgcagattccgcttccccagcggcgcggagctgtaacccctacccctgcctccccgaagcctccctggggccccttcaggcctccttactccatcttccagacccctggcgaccaccgcccctctcagtggctccagggcctccctcagaggtccccaaagatggacacacaaccccagcggcagcaggaaaaacatatggg

SEQ ID NO: 1250 - DNA, 466 bp, Homo sapiens
acactgccccagtgtggggcttagtggcggctcctggccctgactgaggggctgactgaagcctggtgagagcgtgctgggtcagcctctccctggcgggaatcctctccgtccagtcttctaacctagcagcctcacgtccacagagctgccttgtgaaactcagcagagccctggcttcctgcagagccgtgttctcccagcctgcttcatggctccctggttgagccaagcttgcggatccgtggggtgaaggtacccgcaccgcctgggccttagtggtatgtacgggcctgcatcgtgagcagcgggcgggggcccaggcaggtgaggcagctggccacaagggcagggcccggcccccctcccaaggctgtgtctgatattcttgagcctgttcgagtttccttttccaagcctcctgttctcccacccccacccctgccatgctgcagtgactaaatct

SEQ ID NO: 1251 - DNA, 1139 bp, Homo sapiens
catacagtgacttttgaagtgtccccatggggacctagaagtgcagtggcggctcctattacaatgtggtcactggcctgaaggagccaaatgggagatgatggggagtggacctggggccccctgtgatcaggaccacccaggaagacagcccagggggcctcgagcgatgggcttcttcccacaggagggctcttggagccagtgacaggcaggaccttggagaaagggaggctttggacaggagctgagggcagagagggggcctgagcaaagatgtggtaaaggggccacggtggaggctgggaagctggaaatctgaggcctctagactgggatgcagggcacacggggccagtgcgaagacggaaccggtgctctggcagcgggtgccgtgggctaggatgactttctgtagatgacggagctgggggccatgacctaacaaggggctctgccaggagcttagaagtcctgccgggcagggagggactctctggggcttattgcaatagatgcagtaaaggtctcaccaggtgggagagcccacctaggtggggtgtcccagccacccccagccttggggactcctgggccctcccctgcccagccctgagagactgccctgtctttctgtgcccctgcaaccccgctatcctggccagggcagcccagagcagagtcccacccgcaggacctttctggggacacagtatgggggaggaaacgcggagacgctgggaagagcatttgttacagaggacagtggcctctgcgagcaaaaatcacagaacatcagcctgaagcgggtggctagagagcttttgggggcccccaaactccacacagggtgacctgggggtgaccttggaggcgtggctgctgtgtcctggcttactctgcagtctggacagaggggcagcgcagcccagagaactggtcagccagaccggtgcacaagtgattcctgggggcggaggggtgcaggagagatgtttgggtcccccaaggcctggggaaaatggcccatgagtctgccttcgctctctgaccccagcttccccacagactgggaagaggaagagctcctcatgagctgccttaactcaaggttcccctgaacaccaccacgtggagaa

SEQ ID NO: 1252 - DNA, 1224 bp, Homo sapiens
aaagagtgagtttccctggcctccaggcaagaggctgccagcagcccagggcctgggcagccagccagctccccagtgacctctggctcccttcagtcttcagttcccttccccacccgccttcagcagaagtgagaacagactttgggaagggaagggagttttactaagaaactaagagaaaatgctcttgctccccagctgggagaaaccgaaaacagagaggccggtgggtgcacaggaggcagcctccatccccgggaccatgggtagcaaggtgcagaaacggactcatgccagctgggagagggggccaccgaggggtcaacagagccagtctgcagtgacctccaggacacctgcacctgcctccccaccatccttctggccactccctggtcagcagggccactccctcagaccagcttcccaacacacccaggcctccggtgcagcaagtgcctgggaaaggctgagaggagagctgggccggggctgtgagtggcctcccttggtcaggtgttcactcctggacggtgcccaggggcagagagtgtgattgaccggtcaggagccacaggtggcagcagctcccacaggaggcaatggtcacctggtggcaggggacatattcctgaaggaggcagccagaaaaggcattccccacacaaagtgtgggaaactgagccgggccagaaagtgacaggctggtccagcagccccaggctgagcttgggcacaaagccgggtgcagtggcccacagcggagctggcagggccccagcctcaatcccttgcgcccttacatctctctgtgttccggggaatgcctggccccagccctggcctcggggctctgggaggccctgctcacccccaccctccctgcatgtgcaggaggctctgtggctgaactctgcacacacactgcctgcgatgcagctgggtctgctgctggccaaggccagcactggggccagttccctggggaatgaccatccatgtgacctcccaccaccctcagtggggcctgagggacttctgaagggcggtgcttgggcacaccacgctccgggacccaggactccaggacccatcacactccaggaccaggggcctcgtcggtctggggtttcattctggggctgggtgcagccttggcctcccggctgtgaaccatcatgggtggggctgccttttctcagcccagcaggtccccagctg

SEQ ID NO: 1253 - DNA, 471 bp, Homo sapiens
ggagcatggacaccttctgcccaccacgtgagcccgggatcctgcggctcagaggtgactgctgagtctaagccctggtctggcttcaaggtccaaactccttccacttctctggggattgagggggagtttgctgtaccgggcctgccggggctctctgggccccgccctggtagctgaggccctggggtgctgcggcctccaggttatctccccactgcaggcacccacccagggagcatcccaggggcctcagggtgggggaggccaggaactaggaggttctcactgcccgagcagaggccctacacccaccgaggcatggggctccctgggctgttctgcttggccgtgctgggtgagtccaccagggacgtgatggtggggctgctgctggggccttgaggtcttgggctcaggtgggggtactgggagcacaggagagatgaggcctgaaggaagggcacctct

SEQ ID NO: 1254 - DNA, 890 bp, Homo sapiens
gcagggccctaggagtgatggagatgggcaggccaagcaggccagtgtggggacctccggggcacacaggcagggaagttgctcagcttccagcctttggctgggctgtttggagggaagattccctgggcaggtgcatcctcatcactctgccccaggtccctgatcgggagcagaagccccccctgagaccctcacagctctgcccggtgggcgaggccccgtggagggctggggaattctggtggggcctgggaggttgggattctctgaccaggaggagggccgtgagaggatggtgaagttaaggctcccccaggggcctgacatacacgaggctgccttccttatagaggcaggtggggagtggagagtgtctgggacccagctgggtacaggaccagggaggaggggacgctggggaaggtccctgacagcccctagcctggcctgcttcctcatctttgcctgctccatctttctgcctgcactttcttgccccatccttccctcccctcccctcatgtccattaaggtgaggatggacagtcacctccctatattgtcccaactaacccttgccccttgttgctaggccatcaggttacagagcagggccttccccctctattttgctaaagggcaggtacagggtaatgatgacgccattctcacttgaatgaggcccaggttgaaccattatttcctcatttgctttaaaaacggatacattgttggtgtggctgctaaaaagagagcaggcagctggggctccgggaagtacctgtgcagggcagttccgcctccccctcttggctggctcccgacttctctgattcttgccaaccaagtcctgctaactaaactcctaagagactgactgataaatc

SEQ ID NO: 1255 - DNA, 483 bp, Homo sapiens
aaagcacattctaaggtatgttagttagaatgttctagagaaaagcaagcagggtagaaggaaagggaacaccaggtaggtaggggaaggagggcagcatttgcaggggagggtggagtttgggaaggggccgtgcagcaaggacccgaaggagccgaccgagcaggaagtacctgggcagggaccctgtgtggccagaacacaggaagcaaggggcaaagggtattgaatgaggtcagaggcatggtgtggggttggccggggagggccctgtggggcgcagccataggaggtttggaggggaaaacgcaatctgatttacccttggccgaggtcatttggacactgtgtggatggagatcaaaggcaaaatccaagagagccattaggctactcgggatccagaggagagactgggcaatgcgggagaggcagggagatggggtggacatacattctggaggccagcagcagctgctggca

SEQ ID NO: 1256 - DNA, 474 bp, Homo sapiens
atggctttgtggtactcaaaggccggccacgtaagatcgtcgagatgtctacttcgatgactggcaagcacggccatgccaaggtccacctggttggtactgacatctttactgggaagaaatatggagatatctgcctgtcaactcataacatggatgtccccagcatcaaaaggaatgacttccagctgattggcatccaggatgggcacctatcactgctccaggacagcatggaggtgcgagaggactttcgtctgcatgagggagaccttggcaaagagactgagcagaagtacagctgtggagaagagatcctgatcatggtgctgtctgccatgaccgaggaggcagctgctgcaatcaaggctcccagggtggcggtggtggcagcagtgatcctcccaagaggccccctcccccaggctggcttggctctgccctggtcctaggctgctggactcctcctacaca

SEQ ID NO: 1257 - DNA, 389 bp, Homo sapiens
tcctcctacacaatttatttgatgttttattttggttttttgcatcacctcaatctgttgggggagcccctgcccttcacctagctcccttggccaggagcaagcgaagccgtggctttggggaagctgccctcctcttccccctcacactacagccctgctcggggagaagggggtgggtgctgcttgtggtttagtttttgtttgtttgtttttgttttttaattcaatctggaatcagaaagcagtggattctggcaaatggtccttgtgccctccccactcatccctggtctggtcccctgttacccatagccctgagcaccaccccaaaagactggggaccagccccgtcccctgcctgtgtctctccccaaaccccttcagat

SEQ ID NO: 1258 - DNA, 706 bp, Homo sapiens
aaaccagtaccttcttaaggtgcttgatcaatgtcggtttctttcttcctccttggaccttttcatctcccagaaattacccctgtggtctccattgcctacaaagtcctggaagttttccccaaaggccgctgggtgctcataacctgctgtgcaccccagccaccaccgcccatcacctattccctctgtggaaccaagaacatcaaggtggccaagaaggtggtgaagacccacgagccggcctccttcaacctcaacgtcacactcaagtccagtccagacctgctcacctacttctgctgggcgtcctccacctcaggtgcccatgtggacagtgccaggctacagatgcactgggagctgtggtccagtgagtgcggtggggggcacagggctgaggaggcaggtggggtgcagatcaatggggagctctgggagtggggattgtgaaccttgctggggttagagagagccagggtgtgagggtgtggacaaggacaggctgccacctccaaggccattctcagtcccttggggcctttaatcaggacttgctgtccctggctggggccctgagggcacagtctcctggcaggggcctgagggcacagagggaaagagcccgatggtggcagaaatgactgggccccagttgtcagctcggacctcaaggtgataaactaggcacgtttgtctgggcgca

SEQ ID NO: 1259 - DNA, 1487 bp, Homo sapiens
ccaaatgtgaaattgtgtggtacacacggcaggtagggcagcagcccagacacaaggtggagggcaaactctagaaggcggcctggaggaggcggcagccacagctaagctcattaggcattttgtaatgaggagaacttactgaggaggaggggtttaaaaccgctcagccatgcctgtgctaccttctcccaccctgccagagccagtgtctgagctgcgggccaacttcactctgcaggacagaggggcaggccccagggtggagatgatctgccaggcgtcctcgggcagcccacctatcaccaacagcctgatcgggaaggatgggcaggtccacctgcagcagagaccatgccacaggcagcctgccaacttctccttcctgccgagccagacatcggactggttctggtgccaggctgcaaacaacgccaatgtccagcacagcgccctcacagtggtgcccccaggtgagagggcccttggatttccagaggggcagctggcgcttctgtgccgggagggtgctagtgtccaagacacaggtcgatgggaagtgggacagctctacccggccactgctgagagcagagagggcacaggaggcaaccatgcccaccctggcccctgcctaaaggaagcccaacccagctgcctccgccccctcccaggagggttgcccagggcacccaccatcgtgctggttggcagccttgcctccactgcggccatcacctccaggatgctgggctggaccacgtgggccaggtaggaaatgggtgctcgatgcagggaggagggagagctgctgatggcctgagaggtccaaccgggccctggctgcagagctcaggtggtggggcttgcagggcagggctgtggccagggcaaagagcggccatcaccgcttacgcatgactcgaaggtgtttatgaggacctactgtgtgccatgtgcctactgaggcttacacattcaaggcgttatcggaccctgaccagtgctcccaggtgccctgtaacacagtctgctggcctctgggagggcagtctcctaagttctttatggggtctgagcagggattgcagggatgatgcctccaggagaccaaggtggaccaggagctcctgccttctgtgagaaccaccttgggcagtctttccgaggtggtggcaagagcctggggcccagcctcccagggtcccctctccaaggccatggctttactaacatgtaaagtgaccaaggcctttgtagtgtctgagtgcaggcaccacaggcctgtgtgctctgcctgtctggctttggtggtggccagccctgcctctgtgaactcatctctctttgtttgggagacactgccgtgtcctggttctcatcctctgcccgtggcccaggcccttacgtggctctaccaggagtctgtccttggcactttcccatctcacttctaccaagtctgttctttccagaagccagactcg

SEQ ID NO: 1260 - DNA, 612 bp, Homo sapiens
aaaaaaaagaaaaaagcctgccagctgggattcttggagtgctggtggccttcagcaaacacagacactgttggtgtgagggcttcaggagggtcacagaaataagggggtctgtgtggccctgtcctcgcctctcaggtgctgtcacatctctctgggtgtagggagagggaggggggcacactgcgaaaaggcccagcccctcccccccacctgctcccctcttccctggagaggcaccccacctcctggtggcccagtcctatggttcaactctcacgtggtccagctcacctgggttgactgtgagccccacctggcacacctgctgttgttaatctgcacctgcaactagcaaaggggggtctggaattcttccgggttcagtcagcctgtgatcccacacctctgtctgtacaacctccgctccccactccaacacacacagagcctgccccagcctaccctgcaccagaccctctgtaccggtttttcttgggatggaggtagagagggacggaggcgagagggggctgaactggaactggattaaactttgccatctgcctgtcgccctgaaaacttcatttctgtttgcatgccatatatata

SEQ ID NO: 1261 - DNA, 547 bp, Homo sapiens
ttgcacaccatcttaagtgtgacgccacactgcccttcacagccttggggctctgcccagaccaggaggaatggggagggggtctttgaccctaccccaggcttagccccagagaggaggaaagagtggcaggccaggcagggaggggctccagggtgtggcctgggtttttcagtgggatgggggaggggttgcttatgagcctgggtgggttcttggtaggtggtgggcttcctagaggaggcggtgggagggcaggggcaaagagggtgagcggtcctcagttcgtccgtcttcccgggggactctctgaccctttctggtccgtgctgcggccggcgtggcccggagactagcccctcaaccccgaggtggggtggacccgggtgctccgcggccacagcccctccccgcctctagaagcgcagtcccgcggctcgcccgccgctcgcgagggccgcactttgccctcggtccctagcggcgcctggccacgcccccggcgggtggagtcgggcggggcgccgggcaggttcctctgcgttcc

SEQ ID NO: 1262 - DNA, 1566 bp, Homo sapiens
tccagcgtcccgggccccgccttcccgccctccacagtctgtcccgctgtcccctcccggtcccgggtcccgccacccaccccacccccagcctcgcgccccgacgcggggtgtccggatctccgcagggagcgggcccctgcctcgctggcagtgggaggagtttgggggcggctcccggacaggtggcccgcacgccgcgactcccagattggggagttcaccgggacggggttttccgaagccacgtggggtaagggagggggcggggggcgacccaacgcccggaaacagggtgtccttcccactcggggcaggccacgggtccgccttcccacccgaagttgagggaccccaagatgtaccccctccctgtaaggtgggcaatacctccaaaaccaggttttgtgtgtgtgtgtgtgtggcggggagggggcctgttcttggacagccagccctgaaagctggagggggtggcatgagggggcaggcagaggtgggcctgctgtgcccagaccatgcctgggcctggagcttctgaggtcctccagggcgcccacaccagctcccagccaggctgtgggatctgatcgcctctgtcctgggctgtgtccaagaatcaggtgcccagtgggtcgggatggcagtgccaggagtcctggatgggcaccctgctcccatcatcccggagatccggcttcatctccatctgggggcggggcctgtgactgccagctccagagccctatggagagctccctgggacaacagggcaggactggcaggggagagtcctggggccatcccagagggatcctgatgctcacagacctgtcccacacctgctgaggtggagcaggcgtgggtggtggccttcaagtttagggaggtggtatggggctcttcccaaggggctggagctcccctacatccaccctgggtcctccaggtgtctgagttcagagctgtatccacaggcctgagttagtccccttgtagtgccctgtgcatgcagggccctctgtggggtgggagacagactgggagggaccaggatgccacagaggctgcaagtccttgtgtggagacagctggccaggctgaaccagggagggttccaggggttccaggaggtgaagacacaggggcgccagcatggccttcccaagagggcctgtccaccttcaccaaggtgttcaggcagaggctgggtgctgtagaagtgacttgggctgaaggtgacgggggatgggtagtctttgtgacttggcctgtcttggttaaacctctttcaaggtgaggttgggctggggatggaaggactgcccttcatccatcaggtacctaagcagaatgattcctgcagcaggccgatggggcaggagcagcccctgcctaggaggtccctgcccattccccacccctccccggtccaggattcccaggggcaggccccctggtgcctgcagattctcatcctggggtgcatcaggaagcactttgctcatcagctcacctccacaagtttggaggggctaagatgtcagcctccaaaaggggacagca

SEQ ID NO: 1263 - DNA, 1540 bp, Homo sapiens
cccaaaaggggacagcagtagtgggagaggccagcatctgtacaccccatcagggtccccgctgtgtgtgcccctcaggcggccaccagccctaccaggtcctcccctcccggcaggtcttcgccttgatcgtgttctcctgcatctatggtgagggctacagcaatgcccacgagtctaagcagatgtactgcgtgttcaaccgcaacgaggatgcctgccgctatggcagtgccatcggggtgctggccttcctggcctcggccttcttcttggtggtcgacgcgtatttcccccagatcagcaacgccactgaccgcaagtacctggtcattggtgacctgctcttctcaggtatctgcctgtggcacctccatttgatcttgggggaggcattaactctagggttccgcagctgggagggtctcggcctctctgggaggggcagggagcagctcactcctccagggcatttttaggaaagggttttcagctagtgtttttccgtgcttgaatggcaccagccctgcctggggtagctagaagctgagtggacctgcagcacacccgagcagatgggctttgcctctgccccttttgtcccctaggctgtctgctgtggcccaccctgccaaggcccgagtgtgggggactttggaggtggctcccggcccggcttccaagtcctcccctccatagtgtggaggctcccccgggaggtccctgccctacctgcccgcgtcccctcccagagtcctggaaagcccctccctttccatggaactgacgcttcacccgtcctcccccagctctctggaccttcctgtggtttgttggtttctgcttcctcaccaaccagtgggcagtcaccaacccgaaggacgtgctggtgggggccgactctgtgagggcagccatcaccttcagcttcttttccatcttctcctgggtaggatggccaggggccggttcttgggtcaagggtggtggagggtggggtcccccacccacctgtaccctgctgtgctccccctgcagggtgtgctggcctccctggcctaccagcgctacaaggctggcgtggacgacttcatccagaattacgttgaccccactccggaccccaacactgcctacgcctcctacccaggtgcatctgtggacaactaccaacagccacccttcacccagaacgcggagaccaccgagggctaccagccgccccctgtgtactgagcggcggttagcgtgggaagggggacagagagggccctcccctctgccctggactttcccatgagcctcctggaactgccagcccctctctttcacctgttccatcctgtgcagctgacacacagctaaggagcctcatagcctggcgggggctggcagagccacaccccaagtgcctgtgcccagagggcttcagtcagccgctcactcctccagggcacttttaggaaagggtttttagctagtgtttttcctcgcttttaatgacctcagccccgcctgcagtggctagaagccagcaggt

SEQ ID NO: 1264 - DNA, 1480 bp, Homo sapiens
tggctagaagccagcaggtgcccatgtgctactgacaagtgcctcagcttccccccggcccgggtcaggccgtgggagccgctattatctgcgttctctgccaaagactcgtgggggccatcacacctgccctgtgcagcggagccggaccaggctcttgtgtcctcactcaggtttgcttcccctgtgcccactgctgtatgatctgggggccaccaccctgtgccggtggcctctgggctgcctcccgtggtgtgagggcggggctggtgctcatggcacttcctccttgctcccacccctggcagcagggaagggctttgcctgacaacacccagctttatgtaaatattctgcagttgttacttaggaagcctggggagggcaggggtgccccatggctcccagactctgtctgtgccgagtgtattataaaatcgtgggggagatgcccggcctgggatgctgtttggagacggaataaatgttttctcattcagtctccagtcattggttgagccacagcctaggggttggaggaagactccactctgggtacacccttaggggctggctttatggaacttgtagtttgaacaaggcagtggcaatccgccccctccagcctgcctggctggcccccttccctctgtctggggtcgcattccgcacaagcctttcatcaacatcttaaaatagtaactgtgctcagcttgtaaacaagatgatttttctggcctgcagtgccagggtcctgctgctcccttcctagagtgggggtgggggtacctgggagttgtcggtgaatgcccctttcttgcactgaataggggtaccataggtaagaccaggtttctaccttcctccagggtcagcacctctggagccttcctgggacacggccttggccgtccagcccacccctcggagataaggcccatctctggaagaggtcaaggccctaaagcaacttctggcttcttcttttgagcaatgacagagggagctgtcatcggcaagtcccgattgtttaaaaatccccagtacgaactaacagggcactgctcccagcctcacccgatggctttggcttgggacacatcactagcgaaggggagagggaggctggggaggccctgggagtggtgaccctgcctgcacaggacacaccttaccccagcgatgcttgcccccaagtgagctgccaacagcccatctctgaggcacagctgagagatgtcttgactcctgaattaccaagagtttgtttcacaaacaaaacctgacctcacaggcccagcgggcaggacagtgcctcttccttccaactgggccccgggctcctctgtacacccatttttgtcctgacactggcccagacaggaaggcagatgatgttctgcttaggacacaccccatgatcatttctcagttcaagggttgtggttaagagatcagtattactacagaaagatctggg

SEQ ID NO: 1265 - DNA, 1933 bp, Homo sapiens
tctggaagaaaatccccacccaaatcaagttggagctgtccatgagacccagggaaacccaggtgaaagagaaatgtgcgtccaccaaccagtgaattttcaattagttaatttcataagctacagcagaggcgtggaccctgccctctccacacttgaagagataagcccctgggatccaagtcccagcaaggttggtgccacccatcttggtgaaagatgctgttgttcctgtggaaaccatcaccagaggtaggaagggctttgagcccaaaaggaaacaagagggcgtgaatccaggccatcctcaggggagggtgggagcccatcccaggcagagaggcctaagcctcagtgtgggccaaggctcaaaggtgctggcacaggcttcccagggagaacagaaactcagcagtgaaagccgcagaggggaagaagcaggctgatgtcaacagcgtggggctctgtccctcaccccaaggagagggagtgtgccagatcccaggccaccaagcggggccagctccagcctgggcgatcgtcccagcagctgagagggaagctttaagcagaccagtgggtaggagaggagggagcatgcggcaggtggggcagccacacaaaggagagttcccagaaggccaaggtgtggtcaccctccacgcctcccgacttcctcctggagtggctgggcagcatgcagggcagcgtccagtaggcggcagtggcaggaagggagcgggcggccctcgcaggtccctcagttggcagggctgcattgcagaatctgctgtggggcaaagagcttcctggcagccacggcttcccctggctttcctggcactgggcagttctctttgttgtccggcccggcaggctggcctgaggccttcttgaagtagcagagccgacacacggagtggtacttgtctgctcccccaatcacctcgacctggccgcagggacaggggatgggtgaagggccaggacaggaaggaggcagagccatacccccaccccgccggcctgcagggaaggcaggtggagctacctccttctctgtgccgagcctcttggtataggcggcttcccggaagcactccatgcacaccgccgtcagcttcaccacgctctcggccagcggcaccaggttcaggatggccccaaatggctgcgctcccatggaaagacagagggcgctcagccaccttaccaggtgggtttttcttttaaaccctctgattcacaagcactgaagccaggagagtttgctctgaccttagtccttcccccaacccccagagcaccatgcccggctctgtccctttgccaattcaaagcacctgccgcaacagatggcacgcagtctgcacagaccatggagtcccttggctcagccaaggcctgagcagctcggccgtaaccctgtggtggctgagccctggtcacccagagctggtgtctctgtgcccatccagaagcctcttgccctcctcaatcccagctccagacctggatcagacgccttaccttcctctggaaggtcccatccagtgcagccacaattacggtcttcccggcgttggccatggcctcgcagaactccacgatgtcagggaactggaaagggcacgtggagaaagagtgtgagagcttccaccccagcagcagctccctggagccccagcgaagacgctgccagatctgacaactccggccatttggcccggagtaactcttaattctcccacgaggctccccaggccgggggactgtgtccacccgcacgccccccagcagacgacaggtacatccacaactgcgcagccccttccccctgcagccagcttccctccgagtccaggtacccaggactcagcaccggacttccacaccagctgtgctgtttaacactgcagtggccaaaggcctg

SEQ ID NO: 1266 - DNA, 726 bp, Homo sapiens
gcaaggaaggtcctgttgtttaaggatggaaggccctaagttatatacatgctcttcggtgaataggtgggcgctttgtgctcttgcctcccccgttttaaacgggtaatgtgccttgagaaggggcgggggtcctactggccatttacagagcaggatgacacagcacagccttctaaattcaggacctgcacagagcacatttactgtgtaaagcaaacttcactttggcccagggagaagctgaaactctggcaagtgctctggtgattctcatcaatcaatcatatcactcttagctggttgagttcatatgtccagactggcctttgggttgggtgaagcagggatgtccttgtccttgggtgcagggtctctctcccagggccactcaggctttctcagcccaggtactgaggtttgaggttattgagacgtgagggcttagcaaggtgaggactaaggggtggctcgaaaaattccagtgagatccaagcaaagcccaacgtgactgattgcgctcagctgactgcaggggtctctggagaaggaaacccagagactccagcacgccagggcccctccccaccatgcactcgttccctctttttctctgaggactcatgacatgtcacgaaaatgcagctcccagcctgcaaggagctgtgggccggcacaccacctgcgccaggggcgcgccccctggagggctgacgctgccatggc

SEQ ID NO: 1267 - DNA, 468 bp, Homo sapiens
agaaaaaaagtttaaaaaaataaatcagagctcctactattgccaagcgaccctgcaagcccaccacacactgtgcagctgttgatgcaagggtgcccacccaccaccagcatctgaagcacagcacccccagctaggagcttcaggttttccagagatttccaggtgagtctctcttggatgccaacagtttctacagagcagtgtgagcacctgtgtgtctcgcccggggtacaaagaagcacagaagcttctgacccagggccttcctcaggatggcacggtggctactctgtgaaaggctttccctgctgacccagaaaacgggaacaaggcaggttcggctgggcttcatccactgtccacgtagacaatgaaggagcgaaggacagtccttctgctgggtcccatgctaggaacccctctcctcgatctagaactgcttgcaatgggaagaccctgaacttc

SEQ ID NO: 1268 - DNA, 853 bp, Homo sapiens
gacccggaacttcttgaagagaacaagggcacacagaggccagggcagaatgctgatgtctgggtagggtgtaataaatactcactgaatgaactcaagttttacttgctggccagggaggaagtagaccgagaaatccctcctataggctgaacaggggacaggacttcatacgctggctcctgactcagggcatttggatgtcgaggaaggagaagggaaaggtttctgcctcgggggtctgggtcagcctctgtcaacaaggtttacgcagagccaggagaacagagctattgaacaactcacagcggcaggtctgaaggagggagagccttgccaaagctgaagcttccttgttctgagagggccatgtccccaaagctgatgcaaaatccctggatgcattctgaggccacagtttgggagcaaaagagaacagctgcagccctattcccagcctgggctcactttctcgccaggagtccctcaagcacggggcagcaacaacgacgtctccacgtacgcagaggcatgggggtgctcaggggcgcacctctgaaggtcagaaacggaatggccatacccaagcggggaggagatgccagctgccgggtggtcgggaacccagagcggacactggcagcctcaactccacagggcagatgccccgcacaggggaagggacccgtcagcctccccacgggaatggaatttgcagctgtgactcatacagaatgttgggcaagaacagaaccaggaaggcaggactggccttttgaggggacaggccctgtgacgtccgggcagggtattcaggccagagcggcctggctctgtgctgggaggcagggcg

SEQ ID NO: 1269 - DNA, 693 bp, Homo sapiens
ggcggcctccccatcaaccggcctggaaccacgtagggggtctgtgagcgagaaataaattcctgttatgtttatatcaaaccaccacattgtgtacttcgaggcaaccctaaaagtacctaagaggtcaagtctgctaaaccccttggagagagtttcagtttcattctttgtgataaactaacaaaaataaaatctccaaagcagaggaaagaaaactaagataacagaaaataacccagaaactcaaccacagaatatgttcctgaggaaatagaaaaatctggaaaagtctaagaaaagattttcaggaacataatggaaggaacagcataaatttaaaaataacccaacagtaacttgtcaaacaaaacggagcatgatgaattagagcagcagatgtaaaaatagtcactgaaacaaaacacactctggaagatggaacccagaacacctcagagatggatgaggagagaaatacctgaagtgataatggcttcattccttccccagaaatgaaaaggcacaccagctataaagcaggataaatgaaacaaagcttcccctacacacattgtgctgagagagaacagatagaatacctgaccagaggtaacattagagagatggcggccttcctctgagcaaaaacacaatgaccagcgctgctacttttcaaagcaacaagatcaa

SEQ ID NO: 1270 - DNA, 462 bp, Homo sapiens
cgaatcctacaagactatgacactatgacagggaaactagaaaggggccttcagagggtattccaacactagttgtagctatttaaccttgttattttactaaaagatcagataacttccaagtcagcgagggaaaacgggaggacagagcggaagctggcaggaagagtgatgccaagacaagccaacttacaaactgcccctcgtcgatgcctatgacagccacgcccagggcctcctgggccacgtctcggagcaggcaggcgggcagtgcctccatggtgttcctgggaagagaaagccagagcgtgagcagggccagggaggccagaagccacaatgcaggggccagggaatggcactgtcgtgaccacctgctacctgcaaagcaggctcagtgttcacccagccgggctttgagaagttagcacctatgggaaaggccctcgtccagaaaaccag

SEQ ID NO: 1271 - DNA, 436 bp, Homo sapiens
gcatctggcttcaggagcccctcagctcccaccgaaggccacacgccgggtggatctgttctctgcacagccatagcaactctcggatacagctcccagccagggctctgaggctgaagccctataatgtgtggcacagcatggctttgccactgggtgcccaggtggacaagtccagaggaccaagcaaagcgtctcaggctcagaaacatcaggcccacatctgctgccaaggaagtgaatttaactcccaaactgaggttgcaggcggaaatgtccagcgagctcaaacagctacacataaaacagggaagcgtgaaggctgccaggtgacgggggagccagccaacaacggacaactaaaaaattaaacaaaaatcaacgtgcaggccaaaccaaaccagtctgcagcctgtgtgaagctgaaaccctacgg

SEQ ID NO: 1272 - DNA, 645 bp, Homo sapiens
gctccagcccagggagtggagagtgtgcgctaccttgccaagcaccttggaaagtgtgctgatttgaatcattcaatgttcaaatgattaaccatccccattaaagagagtcctaacagtgtgtcctgtgccttgtgattttccactggacaggactgcagggggcagggactgaccggtcatgtgtgcagaagctgctgctgtagcgagtgtctttggcatacttgatcaccaggcacttgtactgagcaatctggaagcgacggacgcgtctcatcaactctgtgctgcaagaggagagagggtcaggtgaggtccacggcgggaggagtgggagaaggagacccctccccaacaagcctggctcctcattgtccctagtggtatgcagactgagcccaccacagccagaaaagagcagggcagagcaggcagggtataatatccctacaaagagggttggaagtcagaattctctatggggaagaggtccaggaatggtactcaggtggtcccaggaagtgtgggaggagtaaccttctccaagatgtagtggggaaggcagaagcaaaggctacatgtagagggaacctgcgactgcattccaaagtaacctcatcccagagttgttcccagagttcagag

SEQ ID NO: 1273 - DNA, 397 bp, Homo sapiens
tggtgcgtgggtagtttactcaagaaactcactagccccacccgggtcagggaatggttctatcacctcaggagagcagaggctccacggcttcagactccttggtttagaaagcgactacgtttccttggccttagaaggaaacagccacattgaataggggtgtacaaaaaggcctggcctacaggggacacaactggttgccaccttctcagaggacttggtggggaagacagctaagctgtaagcagctgtcaccagctccaggagggagtggcgtccacacaggacgaggggcttggcctgggcagaagagggcagagacttcctcctggactgaattcaagggaggagcaccccaggcgggagctgtaggaggctgtgctggtccttctag

SEQ ID NO: 1274 - DNA, 961 bp, Homo sapiens
acgggacaaggggtccccggagaagaggaaggagctccaccccagccccgcgaagccattacctttttcctgagaacatcggcccgagaatcacctaggagagaaggtgaggtcatttgagggcccgccctgcgcggatgcctggacacaggctatcaccacgaccacctcatccccagccacgcgcagggctggcccccgcacctggatctgcccccgggtcttgctgggggagccaggcagcacagtgggcaggttaatgcagctcattgcgcctccgggaagttcacgaacccgagtactctccaaggccgtcccgcagtaagcccctggttcccgcgccgaccgctttaaaccacggcgtgctggccaatcacgagccggccccgccgccatggggccaatcagcgcccggccgctgacctggcgggagatttggccgcagcccgccccctcgtgggaggaatccgggacgtgcgcccagggactgggagggcctggaaatcagggcgatggacgtggctgatcggggtggggcctggtctgagccccgcctcggtccgcccaccaagtttaaaggggcggagcgaggcggggctctggccatataaacagagggacgcacgcccatgcggctgtagacgccatgatggatgtgtctggtgtgggtttcccaagcaaggttccttggaagaagatgtctgcagaggtaggtggattgcagggagggactaaggggctggggcggagttagctcatttattagattggaattccaagaaggaagcttagaagccgtctagagcactcctgtgggcatgcagagcgcctagtgcgtgccaggtccccagtgcttgagcaccatggtgtattttaccttctcctaaggatttttgttaacctggttttcaggataaagaaaattgaagtcctgactatgctaataatatccgtagaccct

SEQ ID NO: 1275 - DNA, 394 bp, Homo sapiens
tccatagacccgcaggaggttaggggacaaagttctggaccttgatctgaggttacacaatgtttttgggtctgtgcttatgtggcacaggctgaaggattcagaacagctggtatttacattggggttgtgaaggttagaaacatacaggccgggtgcggtggctcaaaaaaaaaaagaaagaaagaaaagaaacccattgtataatcatgatcataaataatagcaacaaagatggtggtagtgatcacagagtgtgccaggtgtggctgtaaggatcctacaggtaataacctttccaggtacagattggacagatccaaggacctctgacaaagagctccttcactgggaggaagaagcaacccacactgactggcttgctttattttac

SEQ ID NO: 1276 - DNA, 271 bp, Homo sapiens
tctgtttttttttttctttttttaattctccaaactgcctcagaatggttccttgttactttctgcataaagtgtgaaggtgttagcccgacattcaccgcccctcctcctccagcccagcctcccagcctcacctctgtgtgtcagccatagggcctgccagcatttgcaaactgacctttcattccttcctcctcacctctgtgcctttgactgtgcagtgacctcctgtggtcagaatcgcaccctctcagcgcagatcagctcctcc

SEQ ID NO: 1277 - DNA, 746 bp, Homo sapiens
acctggcctcccctggtcgtaactgctgtgggagtggtgcccatgatggcattaactgaattcgtttgggggacctcatctccccttaaggctgccagctggctaaaggcacagcggtcgctggtatacctctagaccatggatctgagggcatcttggagaccctgggatactggggcgagggcttctaaggcagagaggagcagccgggcatgggcgagggggaggggcacactctgttgagaaggaaagtcttacggagcctcatgtttgtgccctgcaggagctggagaatcagtactgtcccagccgatgggttgtccgactgggagcagaggaagccttgaggacctactcacagataggaattgaaggtactagtgtgacctctccgtggccgcattgggtgtccttaagcatgtggcagtgattcagaatgctgggggttgggggggctgtgctgcaccacctgggcctcgaggggcatttcccaaacaccaggcactttataaacctccctgctcaggggcaggtgcccaggaccccttgctgcagggactactggaggcaggagaggtccgggggaggtccacggctcagtcgaccatgcctggcctttcttgctcagccatccatacccaggcccgtaaggctgcgggctgtggttggcatagggaggtgaagtgaacagaggaacgttccccatccgctgctgaatgtggaatgcggtcactattcctaaaaag

SEQ ID NO: 1278 - DNA, 478 bp, Homo sapiens
actttcaccttttctttctttaaagaaatctggacttgggaacctgtaaactagtgaagtcttaaggtccatttccatctctaccctgtatctgcaaagtgctgtaccacgatctgaacacctggtaatgcatccgtgctgggatggggagcaggccccgaggaggaagtgtaggtgaggacgcagccaaccatgcttggcaaattagctctgttgcagcaggctcaacacagcctttcagaggcagatgcctgggctcctgggcttggtggttttctaagcggagagaacccaggaggaggaacagacttgttagaagtgtattccagcaattccaccatcctcctgtctcaatagattgggggggagctgtttcctgggctcttcatgttccttgctgtgctcagctctgatccaaattcatctctatttgctcgataaatacatgagtgtggtgaaacatacaagagctgtaagc

SEQ ID NO: 1279 - DNA, 291 bp, Homo sapiens
actttgccttctttgcaccagggagaattatattttttctcattttttatttgtattcgtccttacaatgccagcctgttaacttgcaatgagggatgttcgcttttaatgagtagacagcctcatccccatcaaggcctggccgccctcatctgggctcagggagaacaaagtctaactgctgtgtgagtatggtcagggcgcaggaggctggcagagagggggtttaagaaccatttcctttaccactagcttttaaattagttttactgtgaccttcagtaaaaatac

SEQ ID NO: 1280 - DNA, 470 bp, Homo sapiens
tgagttgtaaataatagcaatgaagcttttgctttaatgagaaaggaagtttgccataaggtttgttctggggtgtcttgctgaagccctcctgtgttcttgccctggggttcagggactggagggccctctgtggggggcatgagtcacttcattctctgtctctgcaccccagctgtcctctcctagagagaggcaatttctctttcccgaggttagtagagttttttaatatctgagagaggcttatgcatgataatgaacacctatagctgcttggttttaatggccattccacttagaacataaattccatgatgtttttcttaatcgtagcacaactttaatctagtccatttataggcttgagaactcctgtgtgaattaaatcacgaccttctgatgaagccactccgatgagcctgtgaggcacattgtcttcacactgtgctggggcagggttgttggca

SEQ ID NO: 1281 - DNA, 524 bp, Homo sapiens
cacacaaggcttttcagtgaaatgctcactcctcttccctttcgtgtgcccagttcccctggcccccgtcaaggtggccactgttcttcatatggatatagactccccctccctttcatccaaatggccccgtagtacacacagttccaccctgccagtttcacttagtatttcttggagatgtttcctcatctgtacgtagatagcttctcgtcagtacgtcagtacgcagggagccctgcaggggcaagtggttggtaacgtgggtgctggcaaaacaggttttgcaacctcactggcgttctgcaaaggcagcttcctgcctggattggcccatgggcaacttccctttgatttccctcagctttaatccatccagctgaagtggagacagcccggtttatggttctgcattctggcatagacgcaattcgtacaagctctcagccccatgctttttcttcctctgccgtgtttacccttctggagttgcagaatgaatcacccacccgagggaagcacgg

SEQ ID NO: 1282 - DNA, 459 bp, Homo sapiens
aggcttttttttctctaggcctgctgtggccaccaaggctggggaccagggggcctccagggacagggatcccaagttgcacgttaatacacggagccctttctgagatgcaggttctacagggaactggattccacctcttttggggagatcaacccagcagcccaaggatcccctgatggtgcctgagcacagctgtgagaagggggtatctggatccttggggtgacaggatgggagaggtggagcatgggcctgcaggctggcccccagaggccttaggtctctgctgactagctagaattctgaaaactgtgttatgtaagacgtttagcatctgcagtgccaaataaaggtgacccccacaacgacataaaaaaaaaaaaagatatgtccaaatcctaaccctgggaacctatgaaaatcctaaccctgggaacctatgaaggtatttcctta

SEQ ID NO: 1283 - DNA, 369 bp, Homo sapiens
tttctaccacctgagcttgtgctgacagcgacttgtccatttctgagacagccaccacaagggcccgggccaccaggaagagcctgctgcatgtcccctatggagacggcgaaggggagaaagtggacatttacttccccgacgagtcgtctgaaggttgtcggtgaaggggctgggggtcccggggcttgggggtccagtggcagagctcagcagggcgggccttgctcacacgccctgtgcttggttttgcagccttgcctttcttcctgttctttcacggaggatactggcagagcggaaggtgagtcgggggatgtggatggtggactgcaagagagattccactttccctgggggactcctcct

SEQ ID NO: 1284 - DNA, 1304 bp, Homo sapiens
tctcacatgggaccagaaaggggtgatgctgtgcgtggacaggacatctggcaagtggtgtgtccaggacacaggaagcagcgtagtggccaagctgcctccagctgtcacatctgtgtgtctctgcagtaaggatgagtctgccttcatggtccacccgctgacggcacagggagtggccgtggtaatagtggcttacggcatcgcccccaaaggtaataggagtggttgctgcaggtccgagggccggtgggctttaggaggaagtgcatccctgacccagctcatgctctctgtgcaggcaccctggaccacatggtagaccaggtgacccgcagcgttgcgtttgtccagaagcggtatccaagcaacaagtgggtgttgccagtagattttcttcctgttggacctcagtgggtgggaggacagtgcaatcagtacctaggatacagccaagctgcccctctggcctgtggagcagaaagcaaattgggactcttcgaagggggcctgatgttgtggggaaactgcgtgcaaatccagctctctgctctgacccctcccaggggaatttacctgtgtggacactcagccggggcccacctggctgccatgatgctcctggccgactggaccaagcatggggtcacgcccaacctcagaggtttccatgggagctacagcctggctgggcaaccttcatctccccatgagccttggggtttgggccaactgcttgaaatcctcccggccatgagtggcttgaccgcagggcttcgagccctctgagcaaggccttctctgcctcctctgtgccccttcccctggtcctgcccctctggcggtgggggtgggctggccctgccttgctccgcctggagcctggccctgtgacaattctgtaccttcacaggctttttcctggtgagtggggtctttgacctggagcccatcgtgtatacttcacagaacgttgctctccagctgaccctgtgagttacttggccaccacctcccctggctcaccaggagcctggctcctctctgtcctgacccctgtccactccccaccccagggaggacgctcagaggaatagcccccagctgaaggtggcccaggcacagccggtggaccccacctgccgtgtgctggtggtcgtgggccagttcgactcccccgaattccaccgacagtcctgggagttttaccaggtactcccagtgcaggtttgtggccagaggtcgagggtcatgtgggctcattattttcctctttcttttacccaagtggacaagaccctcca

SEQ ID NO: 1285 - DNA, 440 bp, Homo sapiens
ctgtctcatttccttaatcaaattcctgcaaagagctgctctgattctggggcttttgtgtcttctcttcctgttccagattatcttgaaaacaatcttccagtagttctgacgatacttggagcctggtccacgtgcatcccaccttgggaagcctctccaaagagctttcggagctgacactgacagcttcagtttcccccagcacccaggagagccttgctgtgtctgtctgcccggcaagagtccattctcactgctgggacactcatgaaaatctccacgtcctccctcttcccagcctggatggagctccagggctggggaacgtccgcaagtcaatgctcagagatgcccggagctgcctcttagactcgtctggcccatctacctgctgacagagcatgacaaagatgacgctcaaaagtaatgccattact

SEQ ID NO: 1286 - DNA, 290 bp, Homo sapiens
ggtaagggcttccccaagccagctaccctctgccttctgcttcagtctcctgtctgctctgtcctccatctccctgacatttgggtctgtccctgaatgccccggggtctcagcgttggggccaacaccttgaccttgacaggacaatgctacccacatgtaggacaagcttcctctgcacccgagagtggtgtgcatgtcccaagaagccagctatatccatccaccacccaccccaccacaccgcctctttctctcacaccgaatagcattcaagaatttccactgtg

SEQ ID NO: 1287 - DNA, 350 bp, Homo sapiens
ggaaaatacttttttaaacgagggcaatgtgaatctgaaatgccatttgaggaaagatctgttcgcctgacatcctgtttgagcctgggtggacaggacagcacctgccagcatcgggaagcactgcagatgggaagaggcttggtcactctccaaaggtggcaggagttggagggggtgagctgaaggtaaggagaaaggaggtggggacccaggagacaggggctgcgcagcgggctcggggctgacacccccacggatacagttcactggggctcaaacataaaaggaacccaactattgtgggaggaaaagactcttctgcctttctgccttttctttttttcttt

SEQ ID NO: 1288 - DNA, 782 bp, Homo sapiens
tgacccctctgccctttcaaaaactatgttcgttctctcacagccttctcttgtcatattaagtccacaccgcaggcctaatttgtccagtgaatgctatgcaaatatttcatgcacctgctgatcgcaggaatgatatgtacttggtacgcactgatcgtacctcggggtgggagaagagagggcaaggaagcaaagaatagccccctcctttcctggtgcaccttcagatgtgccgatggggcccaggctcgctgcagatggcccccttcccagagacaggggaggatcctccacccactccccagcctccaggaccatcctgactcctgccttcaggcactcaagttatgcgtctagacatgcggatatattcaagctgggcacagcacagcagccccaccccaggcagcttgaaatcagagctggggtccaaagggaccacaccccgagggactgtgtgggggtcggggcacacaggccactgcttccccccgtctttctcagccattcctgaagtcagcctcactctgcttctcagggatttcaaatgtgcagagactctggcacttttgtagaagccccttctggtcctaacttacacctggatgctgtggggctgcagctgctgctcgggctcgggaggatgctgggggcccggtgcccatgagcttttgaagctcctggaactcggttttgagggtgttcaggtccaggtggacacctgggctgtccttgtccatgcatttgatgacattgtgtgcagaagtgaaaaggagtta

SEQ ID NO: 1289 - DNA, 497 bp, Homo sapiens
ccccaaaatgaaaaagacagtggaggcaccaggcctgcgtggggctggagggctaataaggccaggcctcttatctctggccatagaaccagagaagtgagtggatgtgatgcccagctccagaagtgactccagaacaccctgttccaaagcagaggacacactgattttttttttaataggctgcaggacttactgttggtgggacgccctgctttgcgaagggaaaggaggagtttgccctgagcacaggcccccaccctccactgggctttccccagctcccttgtcttcttatcacggtagtggcccagtccctggcccctgactccagaaggtggccctcctggaaacccaggtcgtgcagtcaacgatgtactcgccgggacagcgatgtctgctgcactccatccctcccctgttcatttgtccttcatgcccgtctggagtagatgctttttgcagaggtggcaccctgtaaagctctcctgtctgac

SEQ ID NO: 1290 - DNA, 1124 bp, Homo sapiens
tgcacgcgttctttgaaagcagtcgagggggcgctaggtgtgggcagggacgagctggcgcggcgtcgctgggtgcaccgcgaccacgggcagagccacgcggcgggaggactacaactcccggcacaccccgcgccgccccgcctctactcccagaaggccgcggggggtggaccgcctaagagggcgtgcgctcccgacatgccccgcggcgcgccattaaccgccagatttgaatcgcgggacccgttggcagaggtggcggcggcggcatgggtgccccgacgttgccccctgcctggcagccctttctcaaggaccaccgcatctctacattcaagaactggcccttcttggagggctgcgcctgcaccccggagcgggtgagactgcccggcctcctggggtcccccacgcccgccttgccctgtccctagcgaggccactgtgactgggcctcgggggtacaagccgccctcccctccccgtcctgtccccagcgaggccactgtggctgggccccttgggtccaggccggcctcccctccctgctttgtccccatcgaggcctttgtggctgggcctcggggttccgggctgccacgtccactcacgagctgtgctgtcccttgcagatggccgaggctggcttcatccactgccccactgagaacgagccagacttggcccagtgtttcttctgcttcaaggagctggaaggctgggagccagatgacgaccccatgtaagtcttctctggccagcctcgatgggctttgttttgaactgagttgtcaaaagatttgagttgcaaagacacttagtatgggagggttgctttccaccctcattgcttcttaaacagctgttgtgaacggatacctctctatatgctggtgccttggtgatgcttacaacctaattaaatctcatttgaccaaaatgccttggggtggacgtaagatgcctgatgcctttcatgttcaacagaatacatcagcagaccctgttgttgtgaactcccaggaacgtccaagtgctttttttgagattttttaaaaaacagtttaattgaaatataacctacacagcacaaaaattaccctttgaaagtgtgcacttca

SEQ ID NO: 1291 - DNA, 518 bp, Homo sapiens
aagcatatacttcagtgttgttctggatttttttcttcaagatgcctagttaatgacaatgaaattctgtactcggatggtatctgtctttccacactgtaatgccatattcttttctcacctttttttctgtcggattcagttgcttccacagctttaatttttttcccctggagaatcaccccagttgtttttctttttggccagaagagagtagctgttttttttcttagtatgtttgctatggtggttatactgcatccccgtaatcactgggaaaagatcagtggtattcttcttgaaaatgaataagtgttatgatattttcagattagagttacaactggctgtctttttggactttgtgtggccatgttttcattgtaatgcagttctggtaacggtgatagtcagttatacagggagactcccctagcagaaaatgagagtgtgagctagggggtcccttggggaacccggggcaataatgcccttctctgcccttaatccttacagtg

SEQ ID NO: 1292 - DNA, 608 bp, Homo sapiens
tctttacagtggattacataacaattccagtgaaatgaaattacttcaaacagttccttgagaatgttggagggatttgacatgtaattcctttggacatataccatgtaacacttttccaactaattgctaaggaagtccagataaaatagatacattagccacacagatgtggggggagatgtccacagggagagagaaggtgctaagaggtgccatatgggaatgtggcttgggcaaagcactgatgccatcaacttcagacttgacgtcttactcctgaggcagagcagggtgtgcctgtggagggcgtggggaggtggcccgtggggagtggactgccgctttaatcccttcagctgcctttccgctgttgttttgatttttctagagaggaacataaaaagcattcgtccggttgcgctttcctttctgtcaagaagcagtttgaagaattaacccttggtgaatttttgaaactggacagagaaagagccaagaacaaaattgtatgtattgggaataagaactgctcaaaccctgttcaatgtctttagcactaaactacctagtccctcaaagggactctgtgttttcctcaggaagca

SEQ ID NO: 1293 - DNA, 242 bp, Homo sapiens
cacagaataagtactgggggattccatatccttgtagcaaagccctgggtggagagtcaggagatgttgtagttctgtctctgccacttgcagactttgagtttaagccagtcgtgctcatgctttccttgctaaatagaggttagaccccctatcccatggtttctcaggttgcttttcagcttgaaaattgtattcctttgtagagatcagcgtaaaataattctgtccttatatgtggc

SEQ ID NO: 1294 - DNA, 295 bp, Homo sapiens
ttttagacaaggagcagcttgtgtgcctggaaccatcatgggcacaggggaggagcagagtggatgtggaggtgtgagctggaaaccaggtcccagagcgctgagaaagacagagggtttttgcccttgcaaatagagcaactgaaatctgacaccatccagttccagaaagccctgaagtgctggtggacgctgcggggtgctccgctctagggttacagggatgaagatgcagtctggtagggggagtccactcacctgttggaagatgtgattaagaaaagtagactttcag

SEQ ID NO: 1295 - DNA, 384 bp, Homo sapiens
tgttgcgctatacaaatcctgaagacaaggatgctgttgctggtgatgctggggattcccaagatcccagatttgatggcaggatgcccctgtctgctgccttgccagggtgccaggagggcgctgctgtggaagctgaggcccggccatccagggcgatgcattgggcgctgattcttgttcctgctgctgcctcggtgcttagcttttgaaacaatgaaataaattagaaccagtgtgaaaatcgatcaggaaataaatttaatgtggaaataaactgaacaacttagttcttcataagagtttacttggtaaatacttgtgatgaggacaaaacgaagcactagaaggagaggcgagttgtagacctgggtggcaggagtg

SEQ ID NO: 1296 - DNA, 263 bp, Homo sapiens
caagagttgtgtttgcttcgcccctacctttagtggaaaaatgtataaaatggagatattgacctccacattggggtggttaaattatagcatgtatgcaaaggagcttcgctaatttaaggcttttttgaaagagaagaaactgaataatccatgtgtgtatatatattttaaaagccatggtcatctttccatatcagtaaagctgaggctccctgggactgcagagttgtccatcacagtccattataagtgcgctgctg

SEQ ID NO: 1297 - DNA, 319 bp, Homo sapiens
gtaattttttttaagttaacctctgtcagcaaacaaatttaacccaataaaggtctttgttttttaatgtagtagaggagttagggtttataaaaaatatggtagggaagggggtccctggatttgctaatgtgattgtcatttgccccttaggagagagctctgttagcagaatgaaaaaattggaagccagattcagggagggactggaagcaaaagaatttctgttcgaggaagagcctgatgtttgccagggtctgtttaactggacatgaagaggaaggctctggactttcctccaggagtttcaggagaaagg

SEQ ID NO: 1298 - DNA, 784 bp, Homo sapiens
cgatgattaggaggcagcttaaactagagggagttgagctgaatcaggatgtttgtcccaggtagctgggaatctgcctagcccagtgcccagtttatttaggtgctctctcagtgttccctgattgttttttcctttgtcatcttatctacaggatgtgactgggaagctctggtttcagtgtcatgtgtctattctttatttccaggcaaaggaaaccaacaataagaagaaagaatttgaggaaactgcggagaaagtgcgccgtgccatcgagcagctggctgccatggattgaggcctctggccggagctgcctggtcccagagtggctgcaccacttccagggtttattccctggtgccaccagccttcctgtgggccccttagcaatgtcttaggaaaggagatcaacattttcaaattagatgtttcaactgtgctcttgttttgtcttgaaagtggcaccagaggtgcttctgcctgtgcagcgggtgctgctggtaacagtggctgcttctctctctctctctcttttttgggggctcatttttgctgttttgattcccgggcttaccaggtgagaagtgagggaggaagaaggcagtgtcccttttgctagagctgacagctttgttcgcgtgggcagagccttccacagtgaatgtgtctggacctcatgttgttgaggctgtcacagtcctgagtgtggacttggcaggtgcctgttgaatctgagctgcaggttccttatctgtcacacctgtgcctcctcagaggacag

SEQ ID NO: 1299 - DNA, 1559 bp, Homo sapiens
ggtagatgcatgacttgtgtgtgatgagagaatggagacagagtccctggctcctctactgtttaacaacatggctttcttattttgtttgaattgttaattcacagaatagcacaaactacaattaaaactaagcacaaagccattctaagtcattggggaaacggggtgaacttcaggtggatgaggagacagaatagagtgataggaagcgtctggcagatactccttttgccactgctgtgtgattagacaggcccagtgagccgcggggcacatgctggccgctcctccctcagaaaaaggcagtggcctaaatcctttttaaatgacttggctcgatgctgtgggggactggctgggctgctgcaggccgtgtgtctgtcagcccaaccttcacatctgtcacgttctccacacgggggagagacgcagtccgcccaggtccccgctttctttggaggcagcagctcccgcagggctgaagtctggcgtaagatgatggatttgattcgccctcctccctgtcatagagctgcagggtggattgttacagcttcgctggaaacctctggaggtcatctcggctgttcctgagaaataaaaagcctgtcatttcaaacactgctgtggaccctactgggtttttaaaatattgtcagtttttcatcgtcgtccctagcctgccaacagccatctgcccagacagccgcagtgaggatgagcgtcctggcagagacgcagttgtctctgggcgcttgccagagccacgaaccccagacctgtttgtatcatccgggctccttccgggcagaaacaactgaaaatgcacttcagacccacttatttctgccacatctgagtcggcctgagatagacttttccctctaaactgggagaatatcacagtggtttttgttagcagaaaatgcactccagcctctgtactcatctaagctgcttatttttgatatttgtgtcagtctgtaaatggatacttcactttaataactgttgcttagtaattggctttgtagagaagctggaaaaaaatggttttgtcttcaactcctttgcatgccaggcggtgatgtggatctcggcttctgtgagcctgtgctgtgggcagggctgagctggagccgcccctctcagcccgcctgccacggcctttccttaaaggccatccttaaaaccagaccctcatggctaccagcacctgaaagcttcctcgacatctgttaataaagccgtaggcccttgtctaagtgcaaccgcctagactttctttcagatacatgtccacatgtccatttttcaggttctctaagttggagtggagtctgggaagggttgtgaatgaggcttctgggctatgggtgaggttccaatggcaggttagagcccctcgggccaactgccatcctggaaagtagagacagcagtgcccgctgcccagaagagaccagcaagccaaactggagcccccattgcaggctgtcgccatgtggaaagagtaactcacaattgccaataaagtctcatgtggttttatctac

SEQ ID NO: 1300 - DNA, 243 bp, Homo sapiens
caacatccaaggtctgtgttgagagggtgagttgtgcggcccagcttgccccaagcccgtcttgccatcacgaaggatttcctgactcagctgaatctagctcaacaaagcaaaggactaactaagctgcagattttctctccgctgggcttagcctacattatttacacctgttttcagctggatgggaccaaactggggccttgacttctggggtttccacgtgatccccaaagaggagac

SEQ ID NO: 1301 - DNA, 1218 bp, Homo sapiens
cagatccaggaattgaagcccaggaacaactcttgcagtgagctccccgggtttttgttttctgaacggtgggaagacaggtcagcaaatagccatgcacgtctgcacatgtgtggctggtgtctgcaggagtaccgagaagacggtgagctctgccctggatggcaacaggaaagggcatccctgtgcagctgtttgtcctggcacaggtggcaggctgccagcgggaccaggaagggaaggggaggatgcacaggtcggagggaacggaacgggcactgcaggtgcgctctgcgatgtgaggaaggaagcaaaggctggttccgggatgatgtcggagaagccttgcagcctagggcactgcccattccacgttacccagtgagtcaaagcctcccagaaagacatttagtcactcaaagccagtgcaggtctcagctttgtccggggaggaactttcactctagaaaacacgaactcatttccctttgaggaagttgtttctccaggatatcatttccagccaccatccaggatgctgggcaggtgctgcagtgcccaaggcacggctgccgaagaagcttgtcccttagaaaccccttgtggcctcggaggcgcctgcctgcctccctgagaatggaaccctgttgggccgccaggctcgctgggcaggtgctggggaaggctgggtcaccgtgctgagcccctcacaggcctgggagttgtgcttggggaggagagctcccagctctttggctgcctcccaatcatggccacatctcacaaacaataccactgtccacgaaaaatgaaaaggtgcctggttctaacccatggccccaaccatgaaagagcccttagaatgtgggggtttgactcgaacagtggctttgagtctcccaggggggattagtgtcctaatgccctgagttaatgaattgacttgttggacagggaaactcagtgaggttcattttctgtggggggacgtttgtcaaatgctgtgaaatcagttgtagcatacgcgacgctcagctgctccgacagtgactcagccacggctccagctgcttccccagccctgtagtggaggtggcagatggtgtcatcagcctggcgcagagggctgtgcccactggcatcacaagggccaggcctgctggtcctccagccactggatccaggtagttacatatgggtttaaaagaagagaggcag

SEQ ID NO: 1302 - DNA, 472 bp, Homo sapiens
ggcttggaagccacattgttttttgtcacttataactagagtttcgtccatcaaaagcccattctgcactgatttcagtgataggggtctgatgctggcttggaagagggcctgacagcttagagacaggcttggagttccaagttgatgaaagaacgatgaataatgaaaaataatgtgttgttctaaagtagtgccttttcatactgagctagggtataatttgggtccatttcaagggaaatatactagcagaattcatcaaagtagcccctcgaagactggtgcctgctgcctacgggacaatttaatcagtggttccagctgcacatctagagttgggaacactgaacccaggctttctcatgcagatggggtgtggattgctaaggtggctgtctcctagcgctgcagcatgagtgaaacacgtgtccattctacagagacgcggctccgtgatgctgaaacctcc

SEQ ID NO: 1303 - DNA, 1251 bp, Homo sapiens
tagagtgagagagagaaggggaagtcaccgggaggacacacatggagcacgcagcccaaatggggctcctctgttctccctgcagagtcagttcgtacctttcacatgcacaaaggtgttgatccaaccgaagcaatattgattcttgttatattgctttattgtggggtcagtgtcagagtaccacgagttttcatcacgcaccgttctttccccagctgcagtgtgtttagggggggaacgaggccccaccccctatccctatcgcctctgcctttataacggctgctactctctgagcacctgttgagttctttcaccttccagatctaatgtgctatccccacccctagagaacagggctgctggatgccacatggctcccagagaggggctgtggtcagggaagccccagctccaagggggctggaaaaccccagagctgcccacgtgcggcaacacagtctggtgctgcaggtgtgaggacggctacaaaatacctgagccattctgtcactctgtctgaactctgtttgaaatattgtttcaataactgctaggctggtttttccttcctgactatattcctcaaaccaacaagagcctagcagaggaaagcatggccaaaacgccccaagaagagagccttggcttcacctccaagggccaccatccgggaggatgtcctcagacctctgatcccctctctgcaggctctgcccagccctgtgtggcaacccagaggaagcctccccttcgtttgagatttaaccccagaccttaggcgatggctgcccagcctgtcccttccgcctgtgtggctgcccacgcgggcgttgctcatggggctagtcctgggtggatgggtgggggcctctcgccggctcctctgcctcccacccccactggcaccccacgcctgtcctagaaggttctttctgcctgttttctccgtgagtgactggacaggcagaggccggccttgctggagggggcatttgtaattatgagtgaatccaaaacaaggttttttccttccgcagccccccgcccggctgtggggcccagccactgcacttcaccggatgccgtctggttggtcctcaggactgatacagaccaggaccccagggccagcccgtgccaggctcctatgcttccaggagcacgggtgggtggtcctgctgcctggccggccatcctcctggggtcggtctctggccgatcctccctcctcctctcaagccctgc

SEQ ID NO: 1304 - DNA, 784 bp, Homo sapiens
atggcccggctgggcgcgctgctcctggccgccgccctgggtgcactgctcagcttcgcgctcctggccgccgcggtcgccagcgactactggtacatcctggaggtggcggacgccggcaatggcagcgcctggcccgggcgcgcagagctgctctcctcgcactcggggctctggcgcatctgcgaaggtaaccggccaccgcgccggccctcctccctccgcgacctcgtccctccgacacccccttaaccccgccctgctcgtgttgccccgccagacccccttccaggacccctctcttgcatcccgctctgccccagggtgtctctccgctccctccccatcaccctccgtcttcccccaaaactgacagcccaagggctacaggagggagggagcccagttcggggcccctcacagccggaggagggggctgtggggcgacagtgggggagggaagcctagaggtgtgtagttggggggcctcatccaagtcaccaggggttgtttcttgatcacgctccccggggtttgggcctggcagccccttgtccccgtccctgtcaggcactgtcagagctgttcaccccacacctcctgatgccgcgggggcaggggttccaaatgtgtacagaggcttcagagtccggggagagagaaggggatcccagcaggctggagggtccacagggccccctccgttccccccagctccctcctccggagctggggccagcctggggagcttccccttcacagcgcgagggctggcagggcaggg

SEQ ID NO: 1305 - DNA, 398 bp, Homo sapiens
gtgcacatgtgctggtggcttcctcagtgcaactggggaggagttaggagccttgtgttcatccaacagactgcctaactgtgctccaaagacctcctgacatgcacctgtgtgcacgtgtgcacacgcctgtgcctatgcaggtggctctgcacgcgtgtgagaaccagagagtatgtatgcccacatgacacgagtcaggaagattccagagcgaggcttcccaggagcccgttttgtacaccctttttcctttcaggcaaagcctgagttccacacacaaacgcattacaaggacccctgcctgagggactctgagggggcctccatggagcgtttgaaagtttaaacatgcacctgtgcaggcataacttgcacgtgaaaataaacaaggtgaa

SEQ ID NO: 1306 - DNA, 1178 bp, Homo sapiens
caaggctaaaggtcttgggccttttcatcccacttggagtcccagccctgagtttcagcagaagagaagctggcagggccctgtggtgccagggggtcccctgggctcgggtaggctgctgggtgcaccacagcgtccaggccccaggcttcgaggcctatgtttcccagggcagaacggctgcatcccgctggtcgacccttttgccagtgagagcctggacgtctccacctcggtgcagcacctcatctgtgagtcctgggtggggccacctccccatcctttccaaatattcaggcaaggcagatcccagccatccccatccccatcccgcagcactgcttccactgcccctgcgtttccaagaggacgtttccacgcagacctgtcccagtgctgtgctgctgtccctaaccacaggtgcccagctcccagcctatcctgttttcccctgtctcagtttccctctcagtggtgatggctcatccctttgttattggggaagccaggcagctcccagcttggctggatcctgcgggccttgcagactcctggctccccatttaggactcgattcttccagatggcctgctgtctacctggctggcaccttccacctggcgggttgggggacatgtgaggcctggggatgggggctgggagtgttctggggacgcctcccctcctggccttaggaagcccctgccagagtcagagggggccactgggagggtccagtggtgtccacagagatgggcgtcagccgcttttcctgagaagacgaagcaccacgtcactgtcctccggcagacaagtgctgaagggcccacctggaccagaattctcacctgagccccctttcctgcagtgctgcaccgtgcagtcattgtggtcctgcccctgagcctggtccttctcgtgtgtggctggatctgcggcctgctcagctccctggcccagagcgtgtctctgctgcttttcaccggctgctacttcctgctggggagtgagtctggggccctgggggaatggctccaaagatgggagctgggccacaggtcccgggagtggggtgctgcctctcctgttgccctcgtcccctgctcccttctgggcgggtgctgagtctggcgatggagccgtggcaggcagctccctgtggttccagaaggtaccca

SEQ ID NO: 1307 - DNA, 1238 bp, Homo sapiens
ccgtgataggagcagggcttctggttgtgggtcagagcctgggacagggaggagcaccggggtccaagcttcttggtgcggggggcatgagggcctccagggcaaccccaggacctgctctactgggtcagatcatgcgggggggcctggggccagcccctcaccacacccttctccttcctgtactgtcctggtgggaggagcaagggttccggggtttggcacagatgaggcagggccaggcatgaaggcaggtgagacagggcaccagaggcctcagctctgaccccagcacaggctgagactgtaaccggtaaccacccatccactgacgcggctccagctctgactacatgccgagtgctggccaagtgctcctccgaaggctcctccgagggccccccagtcccagctgcaggtgagaaatctgaggcctggagagggccgagggcctgggctccccttcacccccactggtgctgtctcctcagtttccaccgactgcccagcactggctgttgcggaaggtggactaggggctcctgacagtctgtcctcagccgcccctgtcaatcaaggctaggcccgagccaggccctgatgtctcaggccagctccactgtcaaggctgtggccacaaggagcagaccatccagggctgggggcaccctccctgtttctctgggaggcctctgtcactgaggaggcccgactgggtgcagagattggggaaaccagcagccttggtattggtcacaggccacatgagaacaacagtgaagtcaaggtctcctctagacaatgaaatcaggaagaatccaaatgacctgaccctgcggcccatctgtgagtgttcaaaatccaattaagaggaccttcgggagccagcgactagagtgtaattgggttgggattgtaaccagaagaacttacagggacacggaccctctgcattgtgcctgggagcgaaggcaccggctagggggtggaggggccggaggtagctggtggatgggtgggggttccactgcgactccagcctccccaggcagagggggcctccatcctagtatgagggtcagctgtgggccgaagcacagagggctctcaggatgtcacaccaaaggcacctgcccagggtcagctcggccctcacccctcactagcactgcaaggagggggagggagatagagggccccagatcgattgggtgcccttccctgagacaggatcttgg

SEQ ID NO: 1308 - DNA, 1240 bp, Homo sapiens
ccttccctgagacaggatcttggggggcctgggggaccgacagggcccacggtgacagagtcctttagagtttcccagcttgaggttgcaggtgccagccgcagaggcctcctttaggaggtctgccaggagctgagcctgggccccatcaccagggatttgggaggtacttcaggtcccagtttgggagcttactcttcaccttcattttgggagaaaggccgtgtcctcggccaggctacaggaggcagctggtgtttggagagggctcagctggtggggcggcctgccaggaagtggggccttgggctgcagctgcagccagtgctacaggcagagacaggcagagacaggcacctcctgccgcacggtcagcccccgctgctgggggctgacccccacccctgcttctcccagggaccgcttcattcaatttggcttcacattcttccccaaaataaatccataatttctgttgctacgctgcccagccgggcaggcatccgtgtgtcctccctccctcagcctccccatgccttcttctccccactctctgtcccactcttcttcccaagtttggttcccaggaggaatcacagaagaccaggctgtgttgtgccccttcactgggcaccagtgagatccagacctggccctgaatgtcagcttgggtcagttgccttcttttggctgggcagtgcccagaggggaccctgtgcacccaggaagtgcctgtggggaaatcagggccacctgcccccctggctaacattccctacagtcggcgccaaggacaggctttctcatcagcctgaagctgtgggaagggggtggcactccgggctggttcctccaagctcagtggacaggaaaatgccctggaggcatgggccgagtcccctacctagctcgttgctggaccctgaactgccggatgaagcctggtgcccgccaccctgtgcaaagcccagcttcattcctttgacaacagctttgaccatgtggagagcgggagggaggagagaggagggcccagggcaggcatcctcccctggggaagggcctgaaactcagagctgggaggacaggggggctctggaaggggagtcagagggagggggatgttagccccggaggtagggagggcaaaggtgtgaggaagaggaggcgggggtgcagggcagggactcactctgatcagagcactgggcaacgctgctgccagcagaggccatggctc

SEQ ID NO: 1309 - DNA, 855 bp, Homo sapiens
ctgggggccatggagggtacagagtgtgtggggggcagttatgtgagtgggaaccatgttgaggggcaggtggcactgtttgcaggaggctttatgggatgaggtctctgaggtttgaggactgaattggagcctcttaaagctccactccgccaaatgcagttgactacctttagccctgtccaaccccaagcaggaggtggtgtctgggagaggcggccaggttgacagccaggcagggctaaccatgacaggaagggcggtgtgctgcctgcagctctgcctgaatgctagcggggccggggatgctgaggccatgtctgcaggaccacctgggcctgggcccgctagagcagacaccgagcagctgccctccccatctctcccccaggtgtcctgacactggcgggggtcagcatctacatcagctactcgcacctggcctttgcggagacggtgcagcagtatggcccgcagcacatgcagggcgtccgcgtcagcttcggctggtccatggccctggcctggggctcctgtgccttggaggcattcagcggaaccctcctgctctcagctgcctggaccctcagcctgagccccccaatctgtggtcatctgagtccccagcaggtgggagggaggtaagagggggctgggtttccctttgcacctcccgggattgggcggtcagggccagggccccttgagagtctgggaatcccttctctgggcctcgctggggtcctggccaggaaggggctgggggtgacaaggggtggagggcagagccaagaatccagctcctcatgtttctctgtagatatttggggaggctcccctgccccggcaggcttg

SEQ ID NO: 1310 - DNA, 1204 bp, Homo sapiens
cccgaagggcaggcttggtggagaagaggctgatgagagggcccgagagcccctccgatttgcaggggtggggggcaaggagctgagcgatccagatgtacccctctgccccctcccttgttctcaagcctgctaggtacttttcactgagcacttccgggaagagcaggcacccagatctctgtccttgtcctggcacaggctgctgctgcttccggcccccgacccttcctctctgcagcaacccgggggaggtatgccactgtgagtgccctggtgggcacactgagctggcagagatggaagtcccagaagggtggggtgggggtgtcatgccatggtggaggagtttggggccactccttgcctgcctcaaagggggcctggctgagggtgcttcttgaccacaggggccagggctgcctagggtggcgcagggctgggcctggagtttgggatgcaggcttgttaaacacagggcagaaccccaggttgggaggggctcagtttgcaggcccaggcccgcaggcccactgctggtcccagggtgagacaggtgagaagagggatggccagcacacacttgagtccccttgggccacaaaggctggggcacgcccaccgttatgcagatggacagttgaggtggctgcaggagaagggttcccagggcctgtacaacacgtggaagcactaaacggccccgtttggggtttgggggcccttcccgagtcttgagaggtcttgagaggtgtgctggggaaggtggcagcctcttgtagcttgatcttcctccaccctgccccacccctaggtctctttattgattcaaaggttaaggaagctcctgggggcttgagggggtggcacagttttggtggggcccagtgaggacaaatctggggggtgagcagggcctcctcttcctcctggtgtttgaacgtttaccattccatgtgggaccattgtgccaatttgtccttaagtaaatcacttgtgctgtgtgcagtataagccttttatttttcttagaacttttcaaaataggtaacacatgcctgtctgtcataaacagtacaaacgtgagcaaacactgtcaccagctgtgcgcgtgtctgtctgtccatccagaggtgttctgagagcgtgtgtgcacgtgtgtgtgtgtccactgtgaagtcatctgtagacatacaagcctact

SEQ ID NO: 1311 - DNA, 1327 bp, Homo sapiens
ctgtgaagtcatctgtagacatacaagcctacttcttattcccagatcagcacagggagtggggaggggggcctgggtctccgttttggaaacgggggctggcttcgtgggcatgtcctctcagcttgggaggaaaggtgtggcggactcttcctctcctcctcctggcccccaacttctgctgatgaggcttctcctgggggtttgctgggaagccagggatgtgagcctaacttcaggcctctcacggcagatgtgcttgggctctggggataggacactggggaagacacaccggggaggggctgctgggaccaccagcgttcccggagagtgtgtgtggtggggagggtgtgctgcttgacccttcccttccagaacagagctgcccaccttgcctccacgtgttctggggcgtgtggaacttagccaggccaggtaacttcttcactctctcattggccagccacatccctcaccctctggttggttagtggactccctcacgctctgattggctagtcaactccttcactctgactggccagccacatccctcaccctctgattggctagttgactccactctggccagttgatgccccacactctctgattggccagtcagtgttccttaccctctgaatggccagttaactccctcactctctggctagtctccacagtgattggcccaagggttctgtctgtgttcatggttctctgagtgtcaggctttgcagctgtgattaagaggcggatgagtgcctcccagggaagagacagtgcatggttcaaggtcacccagaatagacaacatgacatcaggctcaaatggtgctgcgtcgtttacagcaagaggagagagcctgtgcaccaaaaccgcttgcaatggtggttcccacggtgggatccactggcccacgtgggcctctttcttcaattttttcttagaatttttcaaaataggtaacacgtgcccttgtgccacaaatagcacaaaggcgagtaaacactgtcaccagctgtgcgcacgtctgtccatccagaggtgttctgtgtgtgtgtgagcaagcgtgtgcacgtgccagaaacaagccctgactcagaggcccttcccccagcatcgaaggcgcttgctcctctcgccacagcaaagccccttctccagggatggcccagctccgccaggtcctgggcccactggcatcccactcgggcatgtttatctgcaccacctggtaggtgcccctgccaggggcctgacctctgtgaggacaggggcctctcatcagctcaggccctatgcccaaccagcatttataaa

SEQ ID NO: 1312 - DNA, 581 bp, Homo sapiens
tcttttgtccatttttttctcattttcaatcacatcttgtcccattctatacctggttatttctgattgagtgggggcatcccacatgaataactgtagaggaaattggaggctctgggagacgtcaccttcctccagagaagacggatctttacttctggcaggcagctaggccagaggcacccaccaccccagattgccgtaatcagggatcacagtgcttcacagctggcttcacttctcacgatggtcagtctacttccaattgcccttactcctagtgggtggcccctcagggactcaacccaaagcttgagggtttttttgtttgtttgtttgttttttgagacagagtcttgcttgagggactcttaccagggtctttcagcaggccttgaacttcagcttctgccctcagccctgtgtgcctgtgaaaagttctgctcagttcctcagctcccgagcagacgcgtcgaggaaaagtgtcccaaatgccaggctcacctctctaggttccctcttctcccagatcttgacctcacaattcatgactgccttgcaggctcttcagtactatcaga

SEQ ID NO: 1313 - DNA, 855 bp, Homo sapiens
ctgagtaatttattttctaaaaaggaaaatacgtattagaggaccacaagataaaatggaaatccctcaccacggcagttaaagccctgaccatcaagttcccatgtccctttctgcttccttctgacgtttcccttcctgaactcaggaagctgtaactggccacgtggccctgaagaaagggctcctctctgacctagagcgaaggcctgccccgctgcctcccgagctctggtgacgggagctggaagggtgtccttcctgtccctacaccctgtcccagacactggaggaattcagtgtgtgctgacaagcatgggggaggtcctaaccctgagtgttgtgggggtgaaggggaccaaagagccccaggagcaggtaacacctcctctgctgcctgcttgctgggaacacctccactccctgcttccaccccagcccgggcacagggtcccggtcactccgtcctcaggactccaacggcctcagcacaaactcccacttcctcagcaccagttcagtgtcctacaccgagacgtcgcggtgccacacggaagcacggactgctctgtccataggaacagtggcacgcacgccacgtggccagtgtgggccagctcatcagcactcacggcccgcaacccagccatgctcaccaccaccatgttcgtctccacgaaggtgggatcaactgagcagacggacaacaccagctcctggagtcctgggccaggtcctgaggtgagcagaggtgaccccaggccctgaccctgaccccattgccagcaaggtcacccgggaggcagggggcagttcggtcacggtaggagaaggaagggccctgtgtcctgactt

SEQ ID NO: 1314 - DNA, 1017 bp, Homo sapiens
gaagacccaggttagaggctctgccagactctgcagagcatcacaatcctggccgtccaccgagggcttccccaggctggactctgcgctgagtagggtctgctgaagcagctggtgccctgggtcccgccctagtgactcaatggccaccctgagtcccaggatccagaagcctgcaggcctgctgggggacccccgacggcacagctcaggccaagtcagaggaagcacagggaagcgagggtggggcgtcctgtccaggcaccttgggtgaatctctgggcgttcccatggtcttgccacagtgcctgctttgtgtcaaccagtcccaccagggccaccgcagccagcatccccacctggtgcatgcttccacccagggctttttggaggcgccaggcttcttcaatgaagtccttgggcctcccagccagggaccccactggggcgcccaggccctgggaggtggagaggagagactcctgccagctcacatccctgtccttgggccagggtggggacagatgcgtagccccatctgcagaggtgttaaaggggaacctggggccagctgccagggatggagctcaggaatccaaccctgcctcctgctggggcgccccaccccacctgtctgtgggaggccagcccagggctttcccaccttggagaggcagaaagacacagagtcacagtgctccacaatgtaggtgggcgggacatgcagggccagcaccacgttcatcagctgggccctgtccaggtggacccaggccccataggtctgggccaggaggtgcacctgggggtgaggtgcaggcagagtcagaggggccaggcctgagggaggcatagagggaggagggtcctgggcttagctgcctgaggaatcaggagggatcaggagacctggctggtgactggctctggtgatctgggacccaagcagtcaggctgtgctgcctaagcctccatgctgggctctgggaggatctgggggtgcacatttaacccagc

SEQ ID NO: 1315 - DNA, 1296 bp, Homo sapiens
gcacgtgggtggcaaggaccaggtggagggcactcacacgagcttgttcctgcagcctcatggggcacacgtttctgcgccagggcagcaggtcctggtgctgctctgggactcagctctggggacttgggggtgggggcatctctgctgttgggctggtgcagggactaggggccctgacctggggtaataattccctttgtgtctcagcctaggaccacacatgtgtccttcctgtgacaggtctggccgctgatgggtgcccatggcataaatcagaggggactgaaccccaggatgggccaggggcacaggaagccaggatcaggctggtggggggcacacagtggtggggctgggcctacctggcgtaggtagttgatggggaggatccggacccccgagatgctgtgtgagttctccaggcaaatgagctcgcagacctggtggtagggactctggaggccccgcgtgatcatcctctccagctcagccagtccagagtgcagtggggcagctctgggagggagtgggagtgcactccagccctctgtgggtcaggaagaggatgagggctgaggggtccaggggcacctcttggcggagtggggggctcctctggagtaaggagccagaccctgagtcctgtgtctgctcccccgaggcctgggccttggagcctttcctctgttctgtgcatctagacagacgtcccagctggggggcactgggcccctcccctattaactcttcagatgctgctgtctggctcccgtcgggagcgcgggagtgctccgagtgtccactagagggcaccaggcaccaagcaccgcccaggtgtctgcccggcaagcctggggccagccccagccgctgccgcccccacgtggcaaatctggggctctgctctccttccttcctcccctggagaggctgccatcccagccagcttctccatggctgtccctttctcccctccgcaggtcccagcctggtgcctgggaagggggtttgcccctgagcagcctgtgctggctggaggatgcccagggccccaggtgagcaatgcctgctccttacctgagccaccccaccctgctcatagacgtggaggtggcactcctgcccaaggaggagctgggagccccggcgccagcagtgacacatcactgagacagaaggagggcaggtcttggcattgagtctggaggcatgtggccctgctcagcgtggctaggctgagccctaaggctacagtcaactcacaaatgcctgaggccggcaaggaaacagcac

SEQ ID NO: 1316 - DNA, 1527 bp, Homo sapiens
cggagaacaggcctgaggggtgagaggaaggtgtggctgcaggaacccggagccagggctatgtggagaggtccctgacgctggcccagaggccctggggaccctcggaagaggagctagggaggagcagacctgcagcccccactgtcctcctcccccatctccttccagggctccccaccaacccaacagaaatggaggaatgtggtccatgagtgtcagagcccccccatatgcactgaggacctgctaggcagacagaagtcgccctgcgctcaccagagatgaggttggccatagtgttggagggcacaaagagggtgcgccccagccctagcagctccacagccatttcttgcagctctgcggagggacagggaagccgctgtgcttgcacactcgggtgtcagcaccgtccatgctgctttccctgtgtcacttgggccagagcacgccctgagcccaggtgaggcccctagcccgaggctccggtgagcagctgagtgggtttggagccccatccaccagctgcacactctgtgggcttagcaaccacacatccagccccacagggccctcagtcaactctgcaccccacctaccctgggccatggcctctccccgctccccccaagaacctctcttgtggtttgaacctgtccccggcagacctcacacctgtctcacttcctttcccctcagccctttgcaggtggggcctgtggtttctctgctgacttcctttcctcgtcaggagggatgagtggggggctggacggggtgtgagggtgcagctggagggtgaggaaggctcccgctcttgctgtaaagcccactgtggtccccccaactgtggcatcaagtccttagcatgacactcagggctggagtgacctggcctctgccccccctcctcagagcctcctgcactctccacacctgccacatccccacctgcgccctgaagacctttctcaccagtctgcttctgctcctgaagacccctgccctgtgagccggcgctcccttccctgcctgggatgcttccactcagcctgcaggagggctcctctgtgaagcccccttccccgtgagccacagcctcgccccatcctctgcttcccagggcaccctctctagactcccatcaactcaagcgcctccccagcctctccttgagcggcagtgacttgttgacatgtgaggctgcctgggagcatggagatcagcatctccagcaacgctgggcagcagctggatacatgcttagccccagccatcccttaaccccttagcagacgggccctcgggattcaactggtgaccccatggcttgtcctggcctagctgaggggtgtgcacaccccaacagtcaaagtggttcactatggcaactcacaacccagggctggggctgggggtcgctgtaccctggagacactccctaggttattagaacccactccttgcgaggtgcagcctgtagaacctgcccctttctacatctattttccatttgccttctgt

SEQ ID NO: 1317 - DNA, 608 bp, Homo sapiens
gttttaagcgccaagggagccacttcccctgcgtcccagaccatcacggacagcgctccgctgccgcctccacgacccccggcctgcacgccggtcttcgccgtagtcgtcgtcccccacgaccgcctcggccatgacgcacctcatggccggcccgggcctggtcaccttgtcgctgcgcaggcccaccacgtaggctgcgacccccgcgctcccacaccccgcccggagcgccccatgtaccggggccgccgctcgggccagtctgcggagcatggcgcgggcagcgcccgactccccaccccggcgggagctgctgactcctctactccccagcgaaggcggcgagagcgacgtggtcggtgcggccagaattcctagagctgggaagcagccgccctgggccgggggtccagggagcgagccccgtggcacgctgggagttgtagttcgcgctccctcgcggcgggcgtgcgcgagcgtctgcgaacgggccccgtggcacgctgggagttgtagtacgggctgcgtcgcggcggagaaccagcgagcccgtgatgctgaagcagaaggttctgctcattgaaggagaaaccgaggccgagcga

SEQ ID NO: 1318 - DNA, 819 bp, Homo sapiens
ccaaaagctacatccggggcctgatgacctctcaggggctctccatctctcttccttcagcttggtgggaattgtaagtacccgcagggtcagtggtcccaaggacacccatgtgatggacaggcttgctgccttcccctccccagagcccttctgggcctgacccacaatctgcaccaaattcctgcccttagaaaacaagccccttatctcattgtctggctccagaccttctgctgggaagtagggggcggggaacggaggcctctgtgggaaggaaaggaggtggtctggcggggcagggactgggggcagggatagcagcgctcaggggagaagggggacaaacaaatggacccccggcccctcgagctatggcagaatcacagaatggcctcctgtttgccaagcttcgcagtctgcaaagcctgccctctgcagcttccctgccaatggtcccagcggctttgcagtggaaggatgggcagggaggctggggtcacagaggcccgaggaccctgcccgagaggcacagctggtcacccaacagggcctttctccctttctcccaaatcagagctgtctccccagataggtggcctctccctgggggaacctggggcagaacagtttccttcttctgggtcctcctatctagtccccgggtcacctgggccagccctgccttgtcccagtggggtctgacagtgtggaggagcaagaagggtgggctctcacacggaaaggtgcagtgaggcctgtggcaggtggaccccatgaccccagcttggcctctggggggttgtctgggctcctaca

SEQ ID NO: 1319 - DNA, 369 bp, Homo sapiens
accctggctgcaactgagatctgagttgtcttgctggtaagctggggacgggccgcagttcccaggctgggatgagaagcccaaagccctctgtggagccaactctacttgcccccacccctgtcccagcactgaccctcttccctcccctctctgcagttcttcttgacattctcactagaagggtcaccatcactggaggtcctggggtcatctcctgccccaacgcaggctggccccacccccacatgccagctgctcccttctctcctgagcccctgccccccaggactgacccctgcagcccagcccttcccaaacttctgagctcctctgtccgtgggtgcagtggggcccctcggcggggct

SEQ ID NO: 1320 - DNA, 1144 bp, Homo sapiens
caatggagggacatgtggttcgccatcccctgcccctgggaccccccaggcagaagtgtgcacaccccccagggtgtgagacccctgtgcagaaggacatggcgaggattccagaggaacaggggctggcctggcctcagcctctcagagtcaggtctgggggtcctgaagacagccccctccctggccttcttgagagatttgcggctcccctgagcagtgggaggccactgggctggctggagggggccttgcgacataagccccaggtgggctgcctttcacggcgcccccggctccctggcacccgcccaggcgcaggcgctggggtgtgggcacacactcacatgctgagttcagtgtgcggattcctgtaacgctgggctgctggcaggaagtgcgcgccggggaggctgctgctgggaacccagggctggccccgctgagataaagggaggcagcagatcgcagctggagatagcggccctgggtcctggtaaacaggtggggggggtggggggggggaaatgtcctttccatcccatcctcttggccctgagcctgcaggatctatagcgccctagcctaagcccagccccgatagcttgggatccagaggggagttgtcggcactgccatcatcattcccagcctgggggactgggtggcaaaggacagggcgctgggcctgggggcctggctgggcccatggtgggcatgcacttggcccacgtgggggccactgggtgtcaaggtcatgtgtgctgttgggagggtgggaaggggaagggagggagctcctccaagcccctgcacttccccaactgggaccccctagtgggaaagatgtccctctccaggttcgccttcagcaccatctccggaaatccagagtgaggtgccatgagggtgcgagaccgggagagaatggggggtggagtgaggggggcgtgagggctgttccccagccaggtgcagagcaggggggctacagagctggggagaccctgtgcatgacttcaacaggaagccacaggatgttcacctgcactccatcagctcaccgtgggctagcgggagctcggcatggcccatccccagtgcccaacacaatgggcgctcaaatacacttgcttgtttaaaa

SEQ ID NO: 1321 - DNA, 1247 bp, Homo sapiens
ccgcttctgtctttagatacggttgcaagctgtggtgtgtgtggacaggggaatggggacttagggattgggctggggggaccctcaggaacccctctactgccttccaggtgtccccagcttgggctgagaccagggcacccccttgtgccttctgcccccacctgctccctcctgggcctaccagcctgcggccgcactggctgctgacagctgggacgctggggtctggcgttatttactgcggcagcttcctcctccttccaggaacttgtcctctaacttggggcggcagcgaggcctctaatctttcggatctcgtttaccggcattggcctctcacttcctgttgctaggcctggaccgaggcacggggtcagctccgtgcactgcgccttgcctgttgccggggcctctgttctggcccctcggcagggaggacagagggtcagatgccgggcctcaggcacagtggccatctggggtagggccagctccacagaggcaggggacccaaggctgagccggctgtgggctctgcttcctggagtccagggtccagcacggggaccaggttattccttcgctcctcctggcttggcagagcgtcatggaaggtggccttccccagactcccccacatcccctcctcccacttctgcagccaccagagccagggcccttgtgggaaaggacagggaagtctcaggagtttgggcacagacaagatccctggagaccgtggggtctgctgccctggagatgtggaatcccaggccttgcccacctcctccaccctgggtgggttccccaaccacccagaggagtgctggcatctcggggccaccagggcatgggcaagagtggctgcccagcccctgccaagggcctgaagccagcgccaggcagaccctgccttgttgagcagtatcttcagtaagggctctgtgtgccgaacacctgctgtgcgccctgcacacttatcccagagatgggattcaaacccaggttgcccagcgcagagaaacagcattctccttctgcatccgtgaaggaagctttgtcttctaaaagccctagcccttctgttaccttgtcctcagccggcctgcttctgtccctgtgccataagccagatgaatttctctcccaggctggccctgcagaggatgagagatggcccttgttagaggcaccctgggcaccccaggcatggctccccagctgatgatagaacaactgagaca

SEQ ID NO: 1322 - DNA, 470 bp, Homo sapiens
atgtgccgtctgattaggaacccaagagccccttcctgggaacagaaggacaactggcacctgctgaggcacgcccacttgccgagctgccctgggatccctgggcagagcgtcatcgcttaagaacctaattccacaacaaatatttgtcacgctcctgccagggccctggcaggagcagaggcggtgtgtactgccatgcattcctggtctgttgggtgattgacacatacaagacgccagcggtcctgagagtcaggtgccttcctggaccccttggtgagcggaggtgagttgccatcaaggagggaagattcaggaagataactccaaggtcctcaatccgtccaccagtcagtggatggcaaacataatccatgggcactgattaggtttgccagcccatgctgagtgctgggttcagtgtccttcgtctcctgccaaggggagaggacctcgaatggacgcct

SEQ ID NO: 1323 - DNA, 1269 bp, Homo sapiens
ggaaacggatagcagagggtggagaggggcttgcttctaaaggcgagacgtgaacctagtgggatgaccaggcagggtgggggtggtggggagttgtggggaggccagtacagaacagctccagggagggcatggagcatggtgtgagcaggaggcctgtctgacctccggggatggccccgtgggacagaggaccttgaaagccaggcagagggatgggatcagatactaacgcccatagggagccctggcaggtccttgagcaggggcatggcagggcaagccttcctttagcccagggtgagcttgcgccaacccgtgctgcagaggagaagggcatggaggatagctactccctctgggtgttcttccggcccggctaccctcagccagagctcaggaatcacactcccctggaacctggagttttggattcaatctttattcaataaatggcttattgggaaccgacagggtggctagagcctgcctggtgttggggttgggggaccctgcctggtggtttgggctctgtgggtgtgtgaggaccactccacggtggtgctggcgttccccattccactctgggctcagcgcccctgacacactccccctgcccactctggaggccaggccccctggtgctgggggaggcactggcttggagaggagcccctggctggtcctcctagaagagagagtctgtggggtgggcctccacagccctgccgggccccacacgggcagctgttcccggaatgggggtttgaaacttttcttttgttggcgaatatgcatgtggtcttaattattaatatgcagcacttatctcccccaaatgttttatcgggattcggcagatccgagtgtgcaggcagtgggtgcgggggcagggcagggatattatgggagcacagggaggccccagaagttggagtgtcctccaaatcagctggatgacccagaggaaggaaagaccctggttaacgatggtcaagttaactctttcaggccctgcccaatgctgcaaaatcgcacctgggtgtttggcctgggtaggcctaccgcgcctttctgggttctggcctatgccgatgtctcccctgccccgcaggaccctggtggactggagggaaggtagggagccgcatctctcagcagcaacccaggacttaaggagggccattgcccttttctggtgggggtgaaggaggaggaagcagcgtgaccttggaatccgtcacctattaacttcccgcgtatcacctg

SEQ ID NO: 1324 - DNA, 1776 bp, Homo sapiens
cagagtgagacgagtcacagatctgaggacctccagcagagcagggaggtgcccaggtggggggcgggcgggtggtctttcttttggggcagcatcccaaaagaaaggaaaaacagcagggggcgtggctcccctcactgccccgcaaccatccctgcctggccagggccttttgggcagtgccactggagattcctggaagtgccttcgggccacacacacacacatcctccgggaccctcccagccccccactctgcgcttcccgggtttgcaggagggccccaaggccagccgggagccctgcaggacctgggaggaacctgagcctgaagggtctaggagcccgccgtgtctgctctcaagtgccccgcgttcccttggcctgatccccgatcccgtgcaccctgcacccagtaggccctccggggccggggctgaatcagcttcggaggcttcagcaaggcattgcagggggtccctacgggaggtttagtccagggcactcgcagtgttgtgggacgctgggcagggctgatcccagccactgagtcttcccgggcagagagcagacaggggggcattgggatttggaggggcacccgggaacctcctgtcccttccgggccgcctccccttaccctgatttcccttgcagggagggctgtgcaggtttgtggtggggtggggaggacttcctagaatttgttgctttgattggaatcttccctattggggcagggttggggtgagctcttgcccaccctgcccaccccctgccgccagaatcctgggctccctccgttgagttgtgttggggtcggggagcttcgtttatggcatccctgaattcaccccaggctttgaagtcaggctcgctccacaggaaaagctcttccaagagggagattccctggacctcctgggcctccgcctggtaattggcgcttcgattaacagctcgggtgcgaggggcacttcagtggggggcagggcagctgagtcaggggcccagcccaggggagatgttacaggagggaggacgggaagggaggcggggaggttggtaattccagattgaggagggtctccgtagctctccgagtgggtgaggacccctcggaggcaagtgtggggtcccccagggcctgctgggcccccttgggcccctggaacaatgggttcccactagccaacctgttcccacagccagaagttgccatggtgaccccctcccaccttcagctacagcttttccagtaaaaccactgcagaaatccatacttcccgacaggcacgcccggccccccaccccccactctgcgcggtcttggagcctcggggagttaaccctgcgcatgctggtgtctgttgtttgggggagacgggagtgagagccggcaatgcgggccccaggctggagaggagagggtggacgggggcaagacaagctgccctgtccttgaaggccccagcgagtgacttgagcaactccaggaagctggagcggagcagtgaagctagctctgacctaggggcccccttggcacagaggaggcctagctggggcccacagcgcagctcaccccttctagagtgaccccctgcccgcagtcgctgggacacgagacccttcccggcctggctgcagctgctaccctgttagccgatcccctcttcctcctctcccctcccggcacaaacctttttcctggaggcagagagggctcagtcccaggtccccgtggccctgctgccagcacctggcggcccccaa

SEQ ID NO: 1325 - DNA, 819 bp, Homo sapiens
cttggggaagaggatccccctagaaggttctgtcctgctgcctctgccaggtggaggggcccctggggacaccccaggctgcaggggctcagggggctccgtggcccaggcccagcctcacttctgcagccagagtgagcaaggagatgctgtaattgttctctctgtagcccaggatgaataattgagaggtctttgaagagaattaattagccagcttattgactggaaacgctttgctgcagatgatggaggatggaagcctgcgtggggcccgtttgccggctggggccgcaccagacattcaattcacacccatggctgctcagcgggaccaggggctcggcctttgcctagtacctgctctctcctgctcaggaggaagtgggggagctgagccccaacttggcaccctgctgtggttctgtcctgatttctggtatggggagggggggcagcaccccttagactcaactctgctctgtcttctaagaggcaagatgggggcctctccaggagtgggggtgggtgtggctcagtcttgggagcagttcccttgcaggatagactctggtcctgggctccttcagtccagcccaccccaccgcctgagccccagccccttttcgggaactagggagtgacaggaaaagacgaaagcgttcttgcctgcaggctgcagggggtcagacatgtcgatgtccctggtgaggctgaggagggccggttctcatggaatggacaaggcgctaggcaggaaatgctggatcactagccccgggtaccagtcattaatagtagtagtaaacattcctccag

SEQ ID NO: 1326 - DNA, 556 bp, Homo sapiens
tcacacaccgtttttaagctggctcaaggatccgtgctctgatgcatcctccagtcccaggcgacgtcaacatggaagatgtgggcaagaggcaaacagtcatgaagggcttgggccatgtggaggatgagcaggaggtgggggccctgagagcgggcccagggttcagccctgcctctgcagctgctggagcaccagtgaagagagggcaggtgccagcaggcatggtgcaactgtgggggacatgggcggggcagggggtacctgggtggagctggttggggaccattgctcttggtccagataaggcatgacaaggcctgggccaagacccctgaaatggggcatggagagtctgtgacagctctgagatatgtggaggggaaggggaatggaacctggtgacttgtggacctgcggaatgggggacaggagttgagatgactccaggtatctcccgacatgagcacatgtatctgcaaatgaggcgggggtcaggaagcacagggagcttgctcttgccccgggggcctaggatgccctgggctgtcatcat

SEQ ID NO: 1327 - DNA, 864 bp, Homo sapiens
atagccctctccatgcctctctgtccagggctgggattggttggcatactctgcatgcctttccccagccctccagctgtcctagagttgggctgggataaccctccagccgccctgtgagttgcactgggatcagtcaggtgtactctgcatgcctcaccccagcccccgagccgtcccgtgggttggagttgtttgcgtcactggctttctgttctcagctgacttagctgggacgtcaacaactccctatgtcagaggcaagtctccgcctgcatctgccagagctccacacagctgcagacacctgtggcttcatctgagtcctcatctcggcctctgggaaccactccttcctaccctttgcctggagacagtggaagccgagggacatttctccgaatggcgttcacttggctccagaaatgagaactggaatgaggaagaggaatcagtctccctccaggtggctgaagctaggcacgtggaacctgggagcagcgggcagccacactggtgcccttcagacagcaggagggggctcttgtccgaagctctgagttcaaaacagaggggacatgggggaacagcaggaggtaggatcaggccccccaactcctgccgagagctcacacctgtcttcagcccctcctgcattcctgccagtggtagccatttgcccttttggttgcctggtgtccaaataccctttctacgttggaggtagggtcctgggggtccctgctccctttcccaggctctgaaaactgactcctgggaatgtgaccaaaatgattacattaaatgcttccacctgaatgtttaatcgtgaagatgagatgccaagttcaagagtaatttagg

SEQ ID NO: 1328 - DNA, 1753 bp, Homo sapiens
ggtgggctgggcagagcctcccacctgctcccctggaggcccatgagtctgggcactggggccccaattcctataaaccggggttgattacggaggactcccctcacctgcaaccccgcctcccaccacagagcccaggcagcagggaagcctggagacaggcgcagagcctctgggcctgggtgcctacccctgcccacccccagggcctcaggccacaggagaccacctaaagcaggagccgggagtagggcccaggctgggctggcacagctgggcctgtgaggggtggaggggccgctggggaagggacttaccagcagcagctctgctgggacctgggaggctctcctcatttccagtaacaagcgggggtgggggcagtgggagggaggaggcggctttccccaggtgccagctgtgcttgaagacagcctgtcccctctgctgtctcctgttctcagctccttaatcccctccccgacctcgtagttgactcctgggctgactcctcccctggaagggaaagaagagccgggctcacccacacccaacaggtgcagcagctgcttgaggtcacagttgctgagaagggaagctgaggccagtggcagctccagccagggttggtgcagcctgctgaggggtcgaggtcacccaatcacccacccagctccacctgcccccacccctcccacccagcctggccaccagcccagacaccttcctcacatggcctgaagacccctgctgacctgtggcaccatgtggcccagcagggtggccaggctggccggggtcatggggtgggggacgctgctccccacctgccctggggtggtcggtgctgttggggaggccactctctaggggcatctgccaggtaggcagaccagaaacttaccccgagttctgtgacccgctccggggagcggggcatctcatgtcctctcagccacgtctgaaagctgggacatggcagagtgggcagggctgccctctgagctgacccccttcccctcctccccatcttgtctctcctcagatctagggctcactctgaggcgtgggtgacacttgccccccaaccccagcctcttcagtgcagggaggcagggcctgaacttcggagggccttggggcaggttcctggggcttgcagtgaggcctcccctttcccagggagaggaagggagaagccgcgtctggcgagggaagcctgtaccctcaccctcactgtgtccagatctgcacccctaacctggcctggggagactggcaccaggtggagctggtccccaaggagccccaaaccccagaacatctgctgcaggggtcagctctcagggggccccagggccagtcctctctgcaccccaccttccctgctcaatgtggcttgtaggaggttatgcaaagcattatgcaaagcacatgcaaatgagacccaaccacaactggtcactctctccaggcaagaccactgaagccctctggtcatcagcaggaatgcaggggcgcctatggcaggccggactccaggtcaggccttggggcagtgaggaagaaggtgcatgccaggtaagctatagtcaaaagggagggacacacaccaccaggcgaatgaatgaagcaaatcaatggcactcctccctgccccagaattcaaaatgacagaccggtgcagacagatgcatgtgtgttctgagaggtggttgtgtacaagcaagctcactccttcagtctcccattc

SEQ ID NO: 1329 - DNA, 508 bp, Homo sapiens
actctcgggtacctggggcgaaggtcgggaagccaggccttctgtaaagcttttaaggacagaaggtgtagcctcccaagttagcacactctggagccccgaatgcagttgccctctacagacctggtcagggcctcaccctgcagcccaggggaagggactgggggctttaaagctctcgcaggtctctgtttggctgtgtggcccaggaccagctccttctactctcctgctgtgaatcagcagcaccacccccgacttagtagcatagtgtgaggctgacgtgcacgtgggtgtgaatcccggtcagcgccactcgttgtgcctttgcgcttcaatggtccctgccaaggctgtggcagcagctcctgagctccccaccatacctcgcctaaagccttagggacaagttcagccacctgagaccaaaagcgccctgcctggctagctctaagcctccaaataacccctgggatcccagcagttcttcactgtaagagtttacttg

SEQ ID NO: 1330 - DNA, 800 bp, Homo sapiens
ctccaaattcacgtctataagaacgattttcctgccccaaccatacatttctcacagataaaggtgcatttttatcatttcgtctttcctggggctgaaatggcttcttctttttgcattttatggttttacaattgtagcagtaaaacattcttgccggcaagatgattgaaaatttaactacaaaaggcatcattcattttatttttgtcttcattggagacataaaatggattcgcaatcatcccaccacagtggttgagtattgtgggttttagagttgctcacatagcacatttatactcaccagtgtgagggctctttgcagccgccaatggagtgatcgtttgtgttttggaagcagcagtaacatttattcctaataatcctgctgcagtgggttcttggtattttatagttgttattgcagtaaaatttatatcctacagaattatgacaatattcagctactaatatgattattatttgtgtgtgtgtgttaaaaccacggaaataaaatttactcccaacaatacagtggcaattttatgtccctaaacctgaccgtaaataataaacataactacagaatgcctgtaaacacataaaacatccttctcggaaaaagtgaactctccattgctatcctgatgagaccagcagctggggagcctggtctagcagttagggctcctgggcagacttcaaaaggatgaagcaacttcttcacaggactcctggagagcaagttgcttaacatttcagagtccaagtcagcccgtctcagagaacgtgggctg

SEQ ID NO: 1331 - DNA, 409 bp, Homo sapiens
cctgcaaggctgtcggttcatgcgctcattccttcactcattactgcagtcctactctgtgtattcattattgcagtcctactgtgtgtgcctcacctctgcagccggatcctgccccagccccaggcatgaaggcatggagcccctgcctgtgcacgtccttcttcctgggctaccctgcctctccccttgtgcctgacattgagggctgtgagacctcctactcgtcacccctcagccagctctgtttggccccccaaaagccttgggacctcctcgggtcctggacgtgggactggctctgattctagcctctgggctgggctgctgctgacaagtgttcagctcctgctgctcagatgaatgaagggacagaaggcgggtgtctaggcatggccgggacctggga

SEQ ID NO: 1332 - DNA, 1411 bp, Homo sapiens
gccctgcagtttctcctcctgcgccgtgccccgcatgatctgcccccagcgaggaaggagactgaagagcagcagggagggtccctggagacagagcgggcagagtgggctcgacgcacccctgacacccatcagcaggcgccttcctcaatgcggacaggcagaccctcctctcttgggcacacactcagtcagcccctgggtcagttgctcctcctaaaatgggactgacagttgaagacctccaagcttcccagtcatagcagtggcccctctcagcccacacccagtccactctggattgctagtggggatcccccgagacagggttctcccccaggctggtcagccccacatctgtgaagctttctgggcctctccacacccccagttctctgaggcaggcggggtctccagggcaaactcgtgtgagcctcacctgtgtgttgcaccgtcctgtctgcaaacagaaaccctcacgctgccgagccgatgcctctgtccccagcacctccttggggacggtggactccatggtcaaagggccaactcaggggagccacagtatctgtgcttcaggcagcccgagttgaggacgtgtggcattctgctggcatcgttcatgcctcactcttggctctggggctgggcacttgctttctggcccagcctgccgccagggtgaatggcctctggggcagatggcgttctgggaacaggtaatgtcctggccagcgggcaggccggagctggagcctgggtggagggctccccaaggaccaccctgggtcccactcggctttccctgcgtgggggcgacactgttgccagttacagaccgcccaagagtgccccgagatctaagcataggacacaacaggggctggtctcatccacctcggatccacccacctgcagcccagtccggctgtgtccctcaggtcacactcactgtgttttgagaactctcctccgggcctacaaagtttgccaaggcgaatgtcaaagggatatgggggcaacagctcccaagatcagccctaatccaccctcctcatctgccctctccatggggcctcactccatgtctccaacatctcaggttggtgtccaagccacggcctcacatggactcacctcctgcttcagtctctgtttctgaccaggcttcttgctcccagggaggagcgagcttggaccgctgctctcagaagggaccctcctagctggacctgcccctgatttggccgggtgccctgggctctgtgcccatctccaccaacctcccagaagcgagagctggatacctgcctctctgtgtccagcttccttccttccttcctcaacaatcagttattaaacacccaggatacagatgcacggtgctgctgcagctgtcctccaggctgcc

SEQ ID NO: 1333 - DNA, 1159 bp, Homo sapiens
aagtagttccctttctgttgcattgggacctagaggcacatggcctgggcctgcccaagggtgtcttgtgaccatgagggagagtctgcagaggacagggcccctccccgtgcaggagggcctggctagttgagtgagtctctgatgaggcagtgcctccgagggtcagtcatgctcaaactcagtgtgccccaagtcctgacccctggtattctgggctatcactgcccaggaaaacagcactccaaaccctggccttcaggcctgttcctttatgcttatcgctggaatccctggtccagagggtcttcaaatccacacaagcccctcctgcttggccctaacccgatgggttaagcgtttcaagggagggcttgagaggtccccaggacatgcctggagggccaataaatgaccgtgaacggtggtgagtgaggcaggtggagagtgtgaccatgaagagcagggcagactccccagagtactgtagggaggcagctgcagtctggatgaagagtacacgccaaggccaattgtggttgctggtgggatgcagctgggaaagcgagagtgaggaccccagaccctggcggctgcaatgcctgggggcatgtgacatggtggtgaagggggaattgtgtgttgatcctaccctggccgcaagtccaggctcacaggccatggccactgaccacaggaagaggcctccctccttaaagtcgggagaatatcccagaactaaggctagtcctgcatcctggccgggaatcccaggccaacaccctccccgcgatcttaggtgcttagcagccctggctggtgacccctgggcggagagagtacggtaatttgcaagaaatccaagaaagccctggtgagtggttgcttttcctatgttgcaaccatccgcgaagtgaatgctgctctgtgtctctattgttgttttgatggtgttcgagatgatgaggagaacctgagtcacagcctttacgagtctgatttcctcaatttacaggagctgcctacgcgttctggaagaattcacatgctgatttgtaggcggcctggccaggtgcttcggagactccagcagcatcgaaggtgtgattttagatctgtactcccgaggctcttgtgttatttaagaaggtcagtgtga

SEQ ID NO: 1334 - DNA, 443 bp, Homo sapiens
cccctggccctcactcagcctctcctcagcctgccactcctgatggggacctactctggctctgtcctccccacccaaacacagcacccccacaagcagtggggagaggtccccagtggagcaggagtcctcctggactttgtacctggggccaccccagcagttaccgctttaaaaagaccacaacaaatgctaagctttggtgttctttatagaattctttttaaaaaacaaaaaaatgatcatcatgttttgtttgttttccatttagaagagaaacactttctcattattttaaaaatagaaacattacagaataggtactgtggaaagtgaaactgtcctttcccccgccaagcctctgtccctctcttctttcttcctgggggctcagcctgccagggccactgagctctaccatacaggttatagctacctgtcac

SEQ ID NO: 1335 - DNA, 774 bp, Homo sapiens
acaatgactgtctttatggttgaactcttcgtttcttgcggctgaaatcacaggggtgagacttgctggcctcccatgccctgtcaccccttgcgtttatgctgttccagtcccggagcccctggcccccaggtctgccatggatactgtgtccatccagccaggcgcctccctaaggccacctcctcctcaggggcttcccaggtgtcccagcagccaggggcaggcgtgccccggggttactccttttttctgacgtgtctcatgccctgcctttgtcatgggtcgctgggcaatcactgcttctcttctcgcctgtcccctccaccttcctgttcccccacaaactgtgagcccatagggagcagagagtacggcttcctgtatctttccctcatcccagcctcatggatcacatggagagcaggccacagactcagtttaaccagtctgctacatgtcttctctgggccaggaaacgaggtcaggcctcctcattccttcctgggccggcgggctcccttcacctcatcctgttcctgggttattcgcttctgacgcgaggccctagggccaccccagctccacatcggcctgtcttctctgcgccctgtggctgactcagccctgaatcacctcttccaccccaggtcctcttcccgggagaagctccaccatgggtgccatttctccttgtcccaggcttttcttgcctctggggactccaagcccttctccgggggatttcacccagctgctgtatatgactctctg

SEQ ID NO: 1336 - DNA, 1225 bp, Homo sapiens
cgaatgagactctggggacaggaagtatttcagtcgatgtcgtcatgttgccagcttcacggggaccaaccaatgggcaggggaaggaaggagggccacgccagtgtgtctcttgtcctggctaggcatagggtcccaagccagagttggggacaagctgaccaagcaaacctcttggggtggctgctcctttcccagggaatccatgcgagagggtggccagggtctgcaggcaatgccaccgggccactgtggatgggagccagtggacttccaggaagggaagctaaagataccctcttcccggcatagcccagaaaggaccgggatctagttccctgtcctgttgtctctgggggcaggggtggtgaccctgagggccctggagcagctatgtggggctgggcacttctgggggctggagtctgggaccgggcatctattggccgagactctggaccggtgggcgagggcagggcagggtgggtgaattactggaagccccactggctctgtctctctgccaagctgcccactgcattctttggcctcctatttccaggcagtgtctgggatgggtcccaggcctggcctgccctgcaccggggagtccgtgtttggagtcaactgagctactgcttagggcggcagctgaggtgggtgggtgcagcttggacatgatgctatcagggacgctgggtacctggaacaaggaccgcctctccctagtgccatcctgggagctcaggtgacctgggagggaagggacatgtgtgagtgcctgtgtgtgcgcaagcgttcattgtggggggtgtgcacgtgcgtgtgcacacgctagcataggtggctgcgttgagacgaggggtcacaggcccgcatgtgcccgagtgtcctaggatgtgtgggtgagtgcaaaccttgggcaggccctgtcttctctagacatccccgtctggtggggtggccagaggggtggcatgggcagtttgggtctggatccctaacccacaacctgccccagggcagctgcccagagtgcttatgccagaacatctccaaggccgccagacgttgggatcgcatgtgccactgcattggctgtccccacccccatccccacgcctctgcccagggactgtagggtcggcgagaagcaaaggcgtgcccccatgcactctggtggctgcaccatggacactgaggttgatgcctggggttttcttag

SEQ ID NO: 1337 - DNA, 912 bp, Homo sapiens
acggttctggtgtttaagtgaggtcaggcatcctctgggaggtcagccgtcgtattgggttccaggcccgtgactactcacgggaggagtgagctgggccactgactccgtctctcacaagcctggaactggggagcaggagaatccctcacctcgtggggctgtggtggggacacttgtgtgggatgcagccagctcaggataggggcagcgaggaccaggcacgagtgggaggagcggggccctcagggctctgtagggttcttgactttttctcgcttctgtggcctcctcctatctccttccctagggccccacctggccttccgaatcctctcacggggcatatcagatctaccccagctgcctgaccgggagagcatcctgttcttcccctctggaattccgggtccacagctgtcttcctactcacatctggcctcggcattcccgccaagccctccccttgaagcacaaggatgttttgtccaggatcctgagcccagggccttccaggtggcagagagagatccggatgtccagccagctctgggggttcccccatcctgccagtgtggggacctccttgctgtagccaggtcaggccagccctagggagacagcaggatggttccaggaagcctgggccgctccccagatcaatgcagggacggacagcagccagcaggctgggccacggcatcagagctggggtcaagaggtttctagccctcttgtggctctcagccccgggtcctggctgcttcctgctgggcagtgacctccccagtccatttccctccctccttcctcccctggcctgagctcagctcatggaaggaggccctgtgtgcaggaaccttgatctgcacctctgaaggatgtcagggcagctttttctctgggcctgta

SEQ ID NO: 1338 - DNA, 513 bp, Homo sapiens
tcccactccccagctccccatctctagaccgagggagccaattaggctctcccgcagcaacaggtggtgagatagaagcttcgaggtggaggtaaagagtgaggactgtgcagcaatgaggagtggcccagatgggtctccctcccttcctgtgccacttctgcaggccccagtgcctgaggggtccagggccctatttggagagctccatggtggaggaggctgctcctccttcctgtggaccactccctgtcccaggggctgctgaccctgcttcactgcctggtggtggatgacgaggtcattatgagattagcacacactccaacgctgggtggagaaactagggtgggagccgagatcttctccagctagttcatgccctgaacaacatgagaaggaagctggggatggtctcacactttgagcttctcccacctgtcaaggttccctgtcttccttccagagccctcttccagcccctgcagcctctgtccccactgccatcccttg
